United States Patent Application Publication US 2009/0104218 A1 - sequence listing, part 6

SEQ ID NO: 21196 - protein, 665 aa, Streptococcus agalactiae
  VARIANT 327, 328: Xaa = Any Amino Acid
MTEKKSFYITTPIYYPSGKLHIGSAYTTIACDVLARYKRMMGFDVQYLTGLDEHGQKIQQKAEEAGITPQEYVDGMAESVKTLWELLDISYDKFIRTTDTYHEEAVAKIFEQLLAQGDIYLGEYTGWYSVSDEEFFTESQLAEVYRDENGNMIGGVAPSGHEVEKVSEESYFFRMSKYADRLKAYYAEHPEFIQPDGRMNEMLKNFIEPGLEDLAVSRTTYTWGVQVPSNPKHVIYVWIDALMNYISALGYGWSDDLSQYHKFWPADIHMIGKDILRFHSIYWPIMLMALDLPLPKRLVAHGWFVMQDGKMSKSKGNVVYPEMLVEXXGLDPLRYYLMRSLPVGSDGTFTPEDYVGRINYELANDLGNLLNRTIAMVNKYFDGEVPRFAVATDFDADLASVATDSIENYHKQMEAVDFPRALEAVWNLISRTNKYIDETAPWVLAKDETDRDKLEAVMSHLAASLRVVAHLIQPFMMETSDAIMEQLGLGTTFDLEKLTFAGLPEGVRVVAKGSPIFPRLDMEDEITYIKEQMNAGKAPVEKEWVPEEVELTSSKGQIKFEDFDAVEIRVAEVIEVEKVEGSDKLLRFRLDAGDEGHRQILSGIAKFYPNEQELVGKKLQIVANLKPRKMMKKYVSQGMILSAEHDGKLTVLTVDSAVANGSIIG

SEQ ID NO: 21197 - protein, 873 aa, Streptococcus agalactiae; identical to SEQ ID NO: 11741

SEQ ID NO: 21198 - protein, 291 aa, Streptococcus agalactiae; identical to SEQ ID NO: 11742

SEQ ID NO: 21199 - protein, 693 aa, Streptococcus agalactiae; identical to SEQ ID NO: 11743

SEQ ID NO: 21200 - protein, 231 aa, Streptococcus agalactiae; identical to SEQ ID NO: 2874

SEQ ID NO: 21201 - protein, 120 aa, Streptococcus agalactiae
TTGCTTAATAATTTATTTAGAACTGTTAGGCTAGCTAGTGCTAATATTAATACTATTTTAAACCAATCTATTAGAAAAAAAGTGCTGAGCAAGATTGCCCAGTCTTATTTTTGTTTGCCA

SEQ ID NO: 21202 - protein, 40 aa, Streptococcus agalactiae
MLNNLFRTVRLASANINTILNQSIRKKVLSKIAQSYFCLP

SEQ ID NO: 21203 - protein, 1215 aa, Streptococcus agalactiae
ATGCACAGCACTATTTATAAATGTCATCATTGCCGTTATCTAATTTATAAAAGTTTTAAAGATATCTTTCCTTTTGCTCTCATTTTTTCTTGGATTGAAATCCTTCAAAAACTCGTTATATCAGATGATTCTTTTTTAGCTCAAACAACAAAGTCCAGTATTTATAAAAACGAGTGGTTATATACGGTTTCCAATACTCTTTATGATTTATCTCATTTACTAATCTACTTTATGGCTAGTTATTTTGTGGCTAGTTTAGTATGGAGAGGCTTATCTAACCAAACTAAAGAAAGTTTTTCTGCCAGTTTACTTGGCTTTGCCACTGTTTGGTTGCTTCTAACTTCAGTTGTTCCAGGTACAGATTATCACTATCCTAGCCAACCCATTTGGCTTATGCTGGCTTTGATTTCGTATCTTTTTATCTTTTTAACTCGACTACTTCAAAATCGCCATCATATTTTCCAGTATAGTATGTTAGCTATACTACTATTAATCTCTTCTATTTTGTCACATATCTTATATCGTTATCCTAATATTGATTTAGAATACCTTATACAAAATCACTTTTCTCAATGGCTGGGTGATGGGCCACATCAATTAATTCCTATTATGCTTTGGTCTATCTTAGCTATTTTTCTAACCTTATCAGGTCTTTTTGTACCAGATATTTTATTTCGTCCGTACTCCTATTTTTCAGTAGTTAGCGAAAATTTAAATGCTGCCTTGAGCCAACATACAGATAAAATCCCTTATCTGTATACCTTTTATACTGTTAAAAATAGCTTTGCTATGTTTGGCGGTATTGGAATCCTATTATCCTTATTTTTAGCAGTTTTATATGAAAGTAGAAAACTACAATCGAAGAATTACTATAAATTGACATTACTGACCTTAACTCCTCTTATTTTTGATCAAAATTTACCATTTTTAGTAGGTCTACCTGTCATTTTACAACCAATATTATTCATTCCGATGGTATTAACAACTATCTTTGCAGAGGCTTTTGGAGCTCTTATGCTCTACCTAAAATTTGTCGACCCTGCAGTTTATACTGTCCCAAGTGGTACACCTAGTCTACTATTTGGCTTTCTTGCTTCAAATGGGGATTGGCGTTACCTTCCAGTCACTGCAATTATTCTAGTTGTTGGCTTCTTTATTTATCGTCCGTTTGTCAAAATCGCTTTCGCTAAGGAGGAGCAATATGAAAAAATTACT

SEQ ID NO: 21204 - protein, 405 aa, Streptococcus agalactiae; identical to SEQ ID NO: 7506

SEQ ID NO: 21205 - protein, 840 aa, Streptococcus agalactiae; identical to SEQ ID NO: 11747

SEQ ID NO: 21206 - protein, 280 aa, Streptococcus agalactiae; identical to SEQ ID NO: 11748

SEQ ID NO: 21207 - protein, 825 aa, Streptococcus agalactiae; identical to SEQ ID NO: 11749

SEQ ID NO: 21208 - protein, 275 aa, Streptococcus agalactiae; identical to SEQ ID NO: 11750

SEQ ID NO: 21209 - protein, 354 aa, Streptococcus agalactiae
ATGTATACGTTTTATGAATACCCCAAATGTACCACTTGTCGTTCAGCAAAAAAAGAGTTAACTGAACTCGGCTTGACTTTTGAAGCGATTGATATAAAAAGCAATCCTCCCAAAGCTTCGTTATTAAAAGAATTGTTAGAGAATTCGCCTTATGACCTTAAAAAGTTTTTCAATACTTCAGGAAATTCTTACAGAGAATTAGGCTTAAAAGATAAATTTGATGATTTAACTCTTGACCAAGCTTTGGACTTATTGGCATCGGATGGGATGCTTATTAAGCGTCCATTGCTAGTTAAAGATAATAAAATTCTTCAGATTGGCTACCGTACTAAGTATAAAGACCTCAACTTAGTA

SEQ ID NO: 21210 - protein, 118 aa, Streptococcus agalactiae; identical to SEQ ID NO: 7512

SEQ ID NO: 21211 - protein, 328 aa, Streptococcus agalactiae
ATGTATACGTTTTATGAATACCCCAAATGTACCACTTGTCGTTCAGCAAAAAAAGAGTTAACTGAACTCGGCTTGACTTTTGAAGCGATTGATATAAAAAGCAATCCTCCCAAAGCTTCGTTATTAAAAGAATTGTTAGAGAATTCGCCTTATGACCTTAAAAAGTTTTTCAATACTTCAGGAAATTCTTACAGAGAATTAGGCTTAAAAGATAAATTTGATGATTTAACTCTTGACCAGCTTTGACTTATTGGCATCGGATGGGATGCTTATTAAGCGTCCATTGCTAGTTAAAGATAATAAAATTCTTCCAGATTGGCTACCGTAC

SEQ ID NO: 21212 - protein, 110 aa, Streptococcus agalactiae
  VARIANT 80, 82: Xaa = Any Amino Acid
MYTFYEYPKCTTCRSAKKELTELGLTFEAIDIKSNPPKASLLKELLENSPYDLKKFFNTSGNSYRELGLKDKFDDLTLDXAXDLLASDGMLIKRPLLVKDNKILPDWLPY

SEQ ID NO: 21213 - protein, 474 aa, Streptococcus agalactiae
ATGTTATATCAAGAATTCTATCAGTCCCCTCTTGGAGAAATTCGCCTTCTAGCAGACAATCTAGGTTTATCAGGGCTTTATTTTGTTGGGCAAAAATATGATATGCTAGCAGTCAACCAAGAGGAAATTGTTAATATGTCAAATTCCTATACTTTACTTGGTAAGAAGTGGTTAGATGCTTATTTTTCACAGCAAAATTTACCTAGTATTCCATTATCATTGAGAGGGACAGCATTTCAGACGAGAGTATGGCAGGAATTACAGAAAATCCCTTTTGGAGATACAAAAACTTATGGAGAATTAGCGAAAGAGCTAAATTGTCAATCTGCACAGGCTGTTGGAGGAGCAATAGGTAAAAATCCTATTTCTCTAATCATACCTTGTCACCGTGTTTTAGGAAGATATGGTCAATTAACTGGTTATGCTGGTGGCTTAGAAAGAAAATCTTGGTTATTAGAATACGAAAAGGAGAAA

SEQ ID NO: 21214 - protein, 158 aa, Streptococcus agalactiae; identical to SEQ ID NO: 11754

SEQ ID NO: 21215 - protein, 1179 aa, Streptococcus agalactiae
ATGGTTTTTAGTGTCAAAACATTTAATAATATTAATCAAATTGGTTTACAAGAGTTAGGGAATCGTTTCCAGATTGATGGGGATATGTCAGAAAATCCTGATGCCTATATTATTCGTAGTCAAAATTTGCATAATCAGGATTTCCCAAGTAACCTCAAAGCTATTGCTAGGGCGGGTGCAGGAACAAATAATATTCCTATTGAAGAGGCAAGTGCACAGGGAATAGTCGTCTTTAATACCCCAGGTGCAAATGCTAATGCTGTAAAAGAAGCAGTCATTGCTGCCTTATTGCTTTCAGCTCGTGATTATTTAGGAGCTAACCGATGGGTTAATACTCTAACTGGAACAGATATTCCCAAACAAATTGAAGCAGGAAAGAAAGCTTTTGCTGGTAATGAAATTGCAGGAAAAAAATTGGGAGTTATCGGCCTTGGTGCCATTGGAGCTAGAATTGCGAATGATGCTAGACGCTTAGGAATGACAGTTCTTGGTTATGATCCCTATGTTTCAATTGAAACAGCTTGGAATATTTCAAGCCATGTTCAAAGGGTTAAAGAGATTAAGGATATTTTTGAAACTTGTGACTATATCACAATTCATGTTCCCTTAACAAATGAAACTAAGCATACTTTTGATGCGGAAGCTTTTTCAATCATGAAAAAAGGAACTACGATTATCAACTTTGCTCGTGCAGAATTAGTCAATAACCAAGAGCTATTTGAAGCGATAGAAACTGGTGTTGTCAAGCGCTATATTACTGATTTTGGAGACAAAGAATTATTAAACCAAAAAGGAATTACAGTCTTTCCTCATGTAGGCGGATCAACAGATGAGGCAGAGCTAAATTGTGCTATTATGGCAAGTCAAACCATTCGTTGTTTTATGGAGACAGGAGAAATCACTAATTCAGTTAATTTCCCCAATGTACATCAAATTCAAACCGCACCATTTCGTATTACTTTAATTAACAAGAATGTTCCTAACATTGTGGCTAAAATTTCAACTGCTGTATCAGAGTTAGGTATAAATATTGATAACATTATTAACCGTTCAAAGGGTGACTATGCCTACACACTAATAGATTTAGATGAAACGGATAATAACAAGATTTCTACTTTAATTGAAGAATTTGAAGGTGATGAGAATATCGTCCGTGTACGTTTAATTGCAAAAAAACAA

SEQ ID NO: 21216 - protein, 393 aa, Streptococcus agalactiae; identical to SEQ ID NO: 11756

SEQ ID NO: 21217 - protein, 546 aa, Streptococcus agalactiae
ATGCAAATCAGATTAGCTTTTCCAAATGAAATTGACCAAATTATGCTTCTTATTGAGGAAGCGCGTGCCGAAATTGCTAAAACAGGAAGTGATCAATGGCAAAAAGAAGATGGATACCCTAATCGTAACGATATTATTGATGATATCTTGAACGGTTATGCTTGGGTTGGTATTGAAGATGGGATGCTAGCGACTTATGCGGCTGTCATTGATGGTCATGAAGAGGTTTATGATGCTATTTATGAGGGAAAATGGCTCCATGATAACCATCGCTATCTAACATTTCATCGTATTGCTATTTCAAATCAATTTCGTGGTAGAGGACTAGCACAGACATTCCTTCAAGGGTTAATTGAAGGTCATAAAGGACCTGATTTTCGTTGCGATACTCATGAAAAAAATGTCACTATGCAGCATATTCTAAATAAATTAGGCTATCAATATTGTGGTAAAGTACCTCTAGATGGGGTACGATTGGCTTATCAGAAGATAAAAGAAAAGGGAGAAACGAGCATCTATCGTGAGATTGATGAAAGAAATCCCATG

SEQ ID NO: 21218 - protein, 182 aa, Streptococcus agalactiae; identical to SEQ ID NO: 2886

SEQ ID NO: 21219 - protein, 1089 aa, Streptococcus agalactiae
ATGACAATTTATAATTTTTCTGCAGGTCCTGCAGTCTTACCAAAACCAGTGCTTGTAAAAGCCCAATCTGAACTCCTTAATTATCAAGGGTCCAGTATGAGTGTTTTGGAGGTATCGCACCGCTCCAAAGAGTTTGATGATATTATCAAAGGTGCTGAGCGTTACTTAAGAGATTTGATGGGAATTCCGGATAATTATAAAGTAATCTTTTTACAAGGTGGTGCATCCTTACAGTTTAGTATGATTCCCTTGAATATTGCCAGAGGGCGTAAAGCTTACTATCATGTTGCTGGTTCGTGGGGGAAAAAAGCTTATACAGAGGCTGTAAAACTATCAAAAACAATTCCTTTTGAACCAATTCTATTAGCCTCATCAGAAGAATCAGTTTATGATTATATTCCAGAGTTTGATGAAAAAGAGATTGATCCTAAAGCTGCCTATGTTCATGTGACAACAAATAATACCATTGAAGGAACATCGCTTTATGATATTCCTAAAACTAATGGAGTGCCTGTTATTGCGGATATGTCTTCTAATATCTTAGCTGTAAAATATAAAGTAGAAGATTTTGCAATGATTTATGCAGGAGCTCAAAAAAATATTGGACCTGCTGGTGTAACGGTAGTTATTATCCGTGAAGATATGATTAATGAGGAACCAACTTTATCATCAATGTTGGATTATAAGATTCAGTCAGATGCTGGTTCTCTTTATAATACGCCGCCTGCTTACAGTATTTACATTGCTAAATTAGTCTTTGAATGGGTGAAAAGTCTAGGTGGTGTTGATGCTATGGAGAAAGCTAACCGTGAAAAATCAGGACTTCTCTATGATTATATTGATTCCTCAGAATTTTATAGTAATCCTGTCAGAGATAAAAAGAGTCGTTCTCTATGTAACATTCCTTTCATAACTATTAATAAAGATTTAGATGAAAAATTTGTAAAGGAAGCGACAGAACGTGGATTTAAAAATATTAAAGGACATCGTTCGGTAGGTGGTATGAGGGCTAGCCTTTATAATGCCTTTCCTAAACAAGGTGTCATCGAATTAATTGATTTTATGAAAACATTTGAAGCAGAAAATGCA

SEQ ID NO: 21220 - protein, 363 aa, Streptococcus agalactiae; identical to SEQ ID NO: 11760

SEQ ID NO: 21221 - protein, 633 aa, Streptococcus agalactiae; identical to SEQ ID NO: 11761

SEQ ID NO: 21222 - protein, 211 aa, Streptococcus agalactiae; identical to SEQ ID NO: 11762

SEQ ID NO: 21223 - protein, 102 aa, Streptococcus agalactiae; identical to SEQ ID NO: 11763

SEQ ID NO: 21224 - protein, 34 aa, Streptococcus agalactiae; identical to SEQ ID NO: 11764

SEQ ID NO: 21225 - protein, 861 aa, Streptococcus agalactiae; identical to SEQ ID NO: 11765

SEQ ID NO: 21226 - protein, 287 aa, Streptococcus agalactiae; identical to SEQ ID NO: 11766

SEQ ID NO: 21227 - protein, 324 aa, Streptococcus agalactiae; identical to SEQ ID NO: 11767

SEQ ID NO: 21228 - protein, 108 aa, Streptococcus agalactiae; identical to SEQ ID NO: 2894

SEQ ID NO: 21229 - protein, 861 aa, Streptococcus agalactiae
ATGGATTTAAAGCGAACACAACCCAAATTGCTGGAAAAGTTTAACACTATTTTACAGTCAGATAGGATGAGTCATGCCTATCTTTTTTCGGGAAATTTTGCAAGTCTAGATATGGCACTTTATTTAGCACAAAGTCAGTTCTGTGAAAAGCGCCAGAGTGGTTTACCATGCCAAAAGTGTAGAGCTTGTCGTTTAATCGCTAATGGAGAATTTTCAGATGTTAAAATCATAGAACCACAGGGGCAACTTATTAAGACAGAGACTATAAAAGAGCTGACTAAAGATTTTTCAAGATCAGGTTTCGAAGGGAAATCACAGGTCTTTATCATCAAAGGTTGCGAAAAAATGCATGTCAATGCAGCCAACAGCCTTTTGAAATTTATTGAAGAACCTCAAAGTTCATCTTATGTCATCTTATTGACTAATGATGAAAACAATGTTTTGCCAACAATTAAGAGTAGAACGCAAATTTTTCGTTTTCCAAAACAATTGGACATGTTGGTTCATCAAGCTGAACAAGCAGGATTGCTAAAATCACAAGCTAGCTTATTAGCTCAAGTAGCAGACGATCCTAAACATTTAGAAATATTGTTGGCTAACAAAAAGTTATTAGATTACTTGAATTTAAGTCAACAGTTTGTGACGACCTTGGCAAAAGATAGGCAAACTGCTTATTTAGAAGTATCTCGCTTGACATCGCAAGTTGTAGATAAAAATGATCAGGCATTTGTTTTTCAATGGCTGACAATAATGCTGGCTAAAGAAGGCCAACTTTATGATTTAGAAAATACTTATAGAGCTCAGCAAATGTGGAAGAGCAATGTTAGTTTTCAAAATAGTTTAGAGTATATGGTGCTTTCT

SEQ ID NO: 21230 - protein, 287 aa, Streptococcus agalactiae
MDLKRTQPKLLEKFNTILQSDRMSHAYLFSGNFASLDMALYLAQSQFCEKRQSGLPCQKCRACRLIANGEFSDVKIIEPQGQLIKTETIKELTKDFSRSGFEGKSQVFIIKGCEKMHVNAANSLLKFIEEPQSSSYVILLTNDENNVLPTIKSRTQIFRFPKQLDMLVHQAEQAGLLKSQASLLAQVADDPKHLEILLANKKLLDYLNLSQQFVTTLAKDRQTAYLEVSRLTSQVVDKNDQAFVFQWLTIMLAKEGQLYDLENTYRAQQMWKSNVSFQNSLEYMVLS

SEQ ID NO: 21231 - protein, 633 aa, Streptococcus agalactiae
ATGAAAAAAGGACTAATGATTTCTTTTGAGGGCCCAGATGGTGCGGGTAAAACAACCGTTTTAGAAGCTGTTTTACCCTTGCTCAGAGAAAAATTATCACAAGATATTCTCACCACCAGAGAGCCTGGTGGCGTAACTATTTCAGAAGAAATTCGTCATATTATTTTAGATGTTAAACACACGCAAATGGATAAAAAAACAGAGCTATTGCTTTACATGGCTGCTCGACGCCAACATCTAGTGGAAAAGGTACTCCCAGCTCTAGAAGAAGGGAAAATAGTCCTAATGGATCGTTTTATTGATAGTTCTGTTGCCTATCAGGGATCAGGAAGAGGATTAGATAAGTCACATATAAAATGGCTTAATGACTATGCGACTGATAGTCATAAACCTGATTTAACTTTATATTTTGATGTTCCTTCTGAAGTAGGTTTAGAGCGTATTCAAAAAAGTGTTCAAAGGGAGGTAAATCGTCTAGATCTCGAGCAATTAGATATGCATCAACGCGTCCGTCAAGGTTACCTTGAATTGGCAGATTTAGAGCCAAACCGCATTGTGACGATTGATGCCTCCCAACAGCTAGATGAAGTAATAGCTGAGACATTCTCTATTATTTTAGATCGTATCAACCAA

SEQ ID NO: 21232 - protein, 211 aa, Streptococcus agalactiae
MKKGLMISFEGPDGAGKTTVLEAVLPLLREKLSQDILTTREPGGVTISEEIRHIILDVKHTQMDKKTELLLYMAARRQHLVEKVLPALEEGKIVLMDRFIDSSVAYQGSGRGLDKSHIKWLNDYATDSHKPDLTLYFDVPSEVGLERIQKSVQREVNRLDLEQLDMHQRVRQGYLELADLEPNRIVTIDASQQLDEVIAETFSIILDRINQ

SEQ ID NO: 21233 - protein, 657 aa, Streptococcus agalactiae
ATGCCAGTGAAAGATTTTATGACAAAAAAATTAGTTTATGTCTCTCCAGACACTACAGTTGCAGAAGCTGCTGATTTATTGAGAGAACACCACTTAAGGCGTTTGCCAGTTGTTGAAAATGATCAGCTAGTGGGGTTAGTGACAGAAGGGACAATGGCAGAAGCACAACCTTCTAAAGCAACCAGTCTTTCTATATATGAGATGAACTATCTTCTTAATAAGACAAAAATTCGAGATATTATGATTAAAGATATTGTGACTGTTTCACAGTATGCTAGCCTTGAGGACGCTATTTATTTGATGATGTCTCGAAAGATCGGTGTTTTACCAGTAGTTGATAATGGACAACTTTATGGGATTGTCACGGATAGGGATGTTTTTAAAGCCTTCCTTGAAATTGCGGGGTATGGTCAAGAAGGTTATCGCTTGGTTATATTAGCTGATGACGGGATAGGGGTACTATCAAAAGTCCTAAATCGTCTTTCTAGTGCAAATTTAAGTGTTAAACGTTTAGTCATTATTGAACGAAAAGCAGGTAAGAAAGCGGTCGAGATACAACTAGAAGGATACGCTGACAAGGATGTTTTAAAACAAGAACTAGTATTTGATGATGTTATTGTGGAAACTTTAGAAAAGACCATGAAAAAACCACTTTCT

SEQ ID NO: 21234 - protein, 219 aa, Streptococcus agalactiae
MPVKDFMTKKLVYVSPDTTVAEAADLLREHHLRRLPVVENDQLVGLVTEGTMAEAQPSKATSLSIYEMNYLLNKTKIRDIMIKDIVTVSQYASLEDAIYLMMSRKIGVLPVVDNGQLYGIVTDRDVFKAFLEIAGYGQEGYRLVILADDGIGVLSKVLNRLSSANLSVKRLVIIERKAGKKAVEIQLEGYADKDVLKQELVFDDVIVETLEKTMKKPLS

SEQ ID NO: 21235 - protein, 708 aa, Streptococcus agalactiae
ATGACCATGTTGAAAGTAGAAAATCTATCTATTCACTATGGTGTTATTCAAGCGGTGAATGATGTCTCGTTTGAAGTTAACCAAGGTGAGGTTGTAACCTTAATTGGAGCCAATGGTGCAGGAAAGACATCAATTTTGAGGACAATTTCTGGTTTAGTAAGACCAAGTCAGGGTTCTATTTCTTTTATGGGGAAAACTATACATAAGTTAGCAGCTAGAAAAATTGTTGGCAATGGTTTAGCTCAGGTTCCAGAAGGGCGCCATGTTTTCTCAAGTTTGTCTGTTATGGAAAATTTAGAAATGGGAGCCTTTCTTCAAAAGGATCGTGAACAAAATCAAAAAATGTTAAAAAAAGTGTTTGATCGTTTTCCTCGCTTAGAAGAACGTAAAAACCAAGATGCAGCAACCTTATCAGGTGGTGAGCAGCAAATGCTCGCTATGGGGCGTGCATTGATGAGTCGTCCTAAATTATTACTTTTAGATGAACCGTCAATGGGCCTAGCTCCAATTTTTATTCAAGAAATTTTTAATATCATTGAAGACATCAAAAAACAAGGGACTACAGTTCTTTTAGTTGAACAAAATGCAAATAAAGCTCTGACGATTGCTGATAAAGCATATGTTCTAGAGACTGGGAAGGTTGTTTTATCAGGGACAGGTAAGGAATTACTAGTTTCAGATCAAGTTCGTAAAGCTTACTTAGGTGGA

SEQ ID NO: 21236 - protein, 236 aa, Streptococcus agalactiae
MTMLKVENLSIHYGVIQAVNDVSFEVNQGEVVTLIGANGAGKTSILRTISGLVRPSQGSISFMGKTIHKLAARKIVGNGLAQVPEGRHVFSSLSVMENLEMGAFLQKDREQNQKMLKKVFDRFPRLEERKNQDAATLSGGEQQMLAMGRALMSRPKLLLLDEPSMGLAPIFIQEIFNIIEDIKKQGTTVLLVEQNANKALTIADKAYVLETGKVVLSGTGKELLVSDQVRKAYLGG

SEQ ID NO: 21237 - protein, 762 aa, Streptococcus agalactiae
ATGGCACTTCTTGAAGTAAAAAATTTAAGTAAACATTTCGGTGGCCTAACTGCTGTAGGTGATGTTTCGATGAAATTACATAAAGGTGAATTAATTGGCTTAATCGGCCCCAACGGTGCGGGTAAGACAACGCTTTTTAATCTCTTAACAGGAGTATACCTTCCTAGTAAAGGGACAATATCACTTGATGGTAAGATATTAAATGGGAGGAAACCAGCTAAAATAGCTTCTTTAGGTTTAGGTAGAACTTTTCAAAATATCCGACTTTTTAAAAATATGACTGTTTTAGACAATGTACTAGTAGGACTCAGTAATCATCACTTATCACATCCTATTGCTAGTTTTTTACGATTACCCAAATACTATCATAGTGAAAAAGCCTTAAGGAAAAAGGCACTAGAGCTATTAGAGATTTTTGGTTTGAAAGCATATCAAGATGCTCTTGCTAAGAACCTCCCTTATGGAAAACAACGGCGTTTAGAAATTGTTCGTGCTTTAGCAACAGAACCAAAAATATTGTTTTTGGATGAGCCCGCGGCAGGAATGAATCCTCAAGAAACTGCAGAATTGACGCAGTTAATTAGTCAAATAAAGAGTGATTTTGATATTACTATTATGCTGATTGAACATGATATGAACTTGGTTATGCAAGTAACAGAGAGAATTTATGTATTGGAATATGGTCGTCTGATTGCTCACGGGACACCTGAAGAAATTAAAAATAATAAACGTGTTATAGAAGCATACTTGGGGGGTGAGCTA

SEQ ID NO: 21238 - protein, 254 aa, Streptococcus agalactiae; identical to SEQ ID NO: 7544

SEQ ID NO: 21239 - protein, 951 aa, Streptococcus agalactiae
ATGAAAGAAAATATGAAATCAATTTTATCTTGGTTAGCTATAGTAGTGTTAGGTTATCTCTTGATTAGCGTGCTAATATCTATGGGTATATTTAACCTCTATCATATTCAAATTATTGAAACAATTGGGATTAATGTTATTTTAGCAGTTGGTTTGAACCTAATTGTAGGTTGTTCGGGACAGTTTTCACTAGGACATGCAGGTTTCATGGCTATTGGCGCTTATGCAGTTGCTATTATCGGCGTTAAAATGCCAACTTATGTAGGTTTTTTGATAGCTATACTTGTTGGAACTCTTGTTGCAGGAGGTATTGCCTTAGGTGTAGGAATTCCTACTTTGAGACTAAAAGGTGATTATTTAGCTATAGCTACTTTAGGTGTTGCTGAGATTATCCGTATTTTGTTGGTTAATGGAGGTGATATTACGAATGGTGCTGCGGGTATCATGGGGATTCCGCCTTTTACAACCTGGTCTTTAGTTTATGGGGTGGCAGTTGTGAGTCTTATCCTTGCAATGAATTTTTTGCGTAGTCCCTTAGGGCGTAATACAATTGCTATACGAGAAGATGAAATTGCAGCAGAGTCTATGGGTGTGGATACAACAAAAGTGAAAGTAATTGTTTTTATTTTTGGAGCTATTTTAGCTTCTATCGCTGGTAGTTTACAGGCTGGCTACGTTGGAACTGTTATGCCAAAAGACTTTTCATTTATGATGTCTGTCAATGTTTTAATTATTGTTGTTTTAGGTGGTTTAGGTTCAATGACAGGGACAGTTTTAGCAGCAATTTTATTAGGATTATTGAATATGTTACTACAAGACTACGCTTCTGTTCGAATGATTATCTATGCTTTAGCCCTGATTTTAATTATGATTTTTAGACCTAGCGGTTTATTAGGAACGAAAGAGTTAACTCTATCTCATCTATTTCGTAAGACGAGTAAGGGAGGCATT

SEQ ID NO: 21240 - protein, 317 aa, Streptococcus agalactiae; identical to SEQ ID NO: 11780

SEQ ID NO: 21241 - protein, 797 aa, Streptococcus agalactiae
ATGGTATATGGCATTATTAAGCTGATTAATTTTGCTCATGGGGACATCTATATGATGGGCGCTTTCATGGGCTATTATTTGATTAATCATCTTCATCTTAATTTTTTCCTAGCTTTATTAATTGCAATGCTGGGGTCTGCTTTCCTAGGTGCTGTAATTGAATATTTAGCTTATCGTCCACTGAGAAAATCAACTAGAATTGCCGCGTTAATTACAGCTATTGGTGTTTCTTTTCTTTTGGAGTACGGGATGGTATACCTTGTTGGAGCGGATACTAGGGCATTTCCGCAAGCCATTCATACTGTTAAATATAATTTAGGACCGATAACTATAACCAATGTTCAGCTCATCATTTTAGGTATTGCGCTATTACTAATGCTTACTTTACAGTTCATCGTCAAAAAACTAAAATGGGGAAAGCTATGAGAGCTTTATCAGTGGATAGCGATGCCGCACAATTGATGGGAATTAATGTTAACCGTACCATTAGTTTTACATTTGCGCTGGGGTCTGCTTTAGCTGGAGCAGGTGGAGTACTGATTGGGCTTTATTATAATTCTGTTCAACCTCTTATGGGGGTAACTCCAGGGTTGAAAGCATTTGTTGCAGCTGTCTTAGGTGGTATTGGTATCATTCCGGGAGCGGCTATCGGTGGTTTTGTTATTGGCATTTTAGAAACTTTAGCGACTGCACTTGGTGTGTCAGATTTTCGAGATGGTATCGTTTATGCTATTTTAATTCTCATTTTCTTGATCCGTCCAGCAGGAATTCTTGGAAAAAATATTAAGGAGAAGGTC

SEQ ID NO: 21242 - protein, 266 aa, Streptococcus agalactiae
  VARIANT 133: Xaa = Any Amino Acid
MVYGIIKLINFAHGDIYMMGAFMGYYLINHLHLNFFLALLIAMLGSAFLGAVIEYLAYRPLRKSTRIAALITAIGVSFLLEYGMVYLVGADTRAFPQAIHTVKYNLGPITITNVQLIILGIALLLMLTLQFIXQKTKMGKAMRALSVDSDAAQLMGINVNRTISFTFALGSALAGAGGVLIGLYYNSVQPLMGVTPGLKAFVAAVLGGIGIIPGAAIGGFVIGILETLATALGVSDFRDGIVYAILILIFLIRPAGILGKNIKEKV

SEQ ID NO: 21243 - protein, 357 aa, Streptococcus agalactiae
ATGAAAAAAGGACTAATGATTTCTTTTGAGGGCCCAGATGGTGCGGGTAAAACAACCGTTTTAGAAGCTGTTTTACCCTTGCTCAGAGAAAAATTATCACAAGATATTCTCACCACCAGAGAGCCTGGTGGCGTAACTATTTCAGAAGAAATTCGTCATATTATTTTAGATGTTAAACACACGCAAATGGATAAAAAAACAGAGCTATTGCTTTACATGGCTGCTCGACGCCAACATCTAGTGGAAAAGGTACTCCCAGCTCTAGAAGAAAGGGAAATAGTCCTAATGGATCGTTTTATTGATAGTTCTGTTGCCTATCAGGGATCAGGGAGAGGATTAGATAAGTCACATNNNNNT

SEQ ID NO: 21244 - protein, 119 aa, Streptococcus agalactiae
  VARIANT 118, 119: Xaa = Any Amino Acid
MKKGLMISFEGPDGAGKTTVLEAVLPLLREKLSQDILTTREPGGVTISEEIRHIILDVKHTQMDKKTELLLYMAARRQHLVEKVLPALEEREIVLMDRFIDSSVAYQGSGRGLDKSHXX

SEQ ID NO: 21245 - protein, 177 aa, Streptococcus agalactiae
ATGACATTCTCCGCTGGTGATACTGATTTCCAAGCGTCATTGACTAAGTTGAAAGGGAAAGAATATGATGCTATTGTGATGCCAGGTTACTATACCGAGACAGGATTAATAGTTAAGCAAGCGCGTGATTTAGGTATCTCTAAACCGGTTCTTTGGGCCCCCCTTTTGGGGNNNNNT

SEQ ID NO: 21246 - protein, 59 aa, Streptococcus agalactiae
  VARIANT 58, 59: Xaa = Any Amino Acid
MTFSAGDTDFQASLTKLKGKEYDAIVMPGYYTETGLIVKQARDLGISKPVLWAPLLGXX

SEQ ID NO: 21247 - protein, 413 aa, Streptococcus agalactiae
ATGAAGAATGGAGCTGACTTAGCAGTAAAAGAAATTAATGCTGCTGGAGGGGTTGGCGGCAAGAAGTTAAAAGTCCTATCACAGGATAATAAATCAGAAAATGCAGAGGCAGCAACGGTTGCCACAAACTTGGTTACCAAAGGAGCTAATGTCATTATCGGACCAGCAACATCGGGTGCAGCTGCATCTTCAACTCCAAAAGTAAATGCAGCAGCAGTTCCAATGATTGCACCTGCTGCGACACAAGACAATTTAGTCTATGGTTCTGATGGAAAAACCTTAAATCAGTATTTCTTCCGAGCTACTTTTGTCGATAATTATCAAGGAAAGCTATTGTCTCAGTATGCTACAGACAACCTTAAAGCTAAAAAAGTTTCTATTTTATGATAATTCATCAGATTACTCAAAGGGGG

SEQ ID NO: 21248 - protein, 138 aa, Streptococcus agalactiae
MKNGADLAVKEINAAGGVGGKKLKVLSQDNKSENAEAATVATNLVTKGANVIIGPATSGAAASSTPKVNAAAVPMIAPAATQDNLVYGSDGKTLNQYFFRATFVDNYQGKLLSQYATDNLKAKKVFYFMIIHQITQRG

SEQ ID NO: 21249 - protein, 302 aa, Streptococcus agalactiae
TTGTTGGAATTATGTTATAATCTTAGTAATTACAGATATGACGCAGAAAGGAAAAAATTATTGAATAAACAAGAGCGTTTAGGAATGAGCGTTTATCTTTACTATAATCGTGACGCTCGTAAATTATATAAATACGGAGATGTTCATTATCATTCTCGTAGATTAAGATATCTAGTCATTTATGTTAATAAAGAGGATATTGTTAGCGTTAGTAAAGAGATAAAACATTTAAAATTTGTTAAGGATGTTCGGTTATCACAATTGATGATATTGATCAGGATTTTGTTGGAAACTTATATCGC

SEQ ID NO: 21250 - protein, 101 aa, Streptococcus agalactiae
  VARIANT 87: Xaa = Any Amino Acid
MLELCYNLSNYRYDAERKKLLNKQERLGMSVYLYYNRDARKLYKYGDVHYHSRRLRYLVIYVNKEDIVSVSKEIKHLKFVKDVRLSXIDDIDQDFVGNLYR

SEQ ID NO: 21251 - protein, 588 aa, Streptococcus agalactiae; identical to SEQ ID NO: 11787

SEQ ID NO: 21252 - protein, 196 aa, Streptococcus agalactiae; identical to SEQ ID NO: 2920

SEQ ID NO: 21253 - protein, 627 aa, Streptococcus agalactiae
ATGGGAAAATTTCAAGTCATTTCACATCCACTTATTCAACATAAACTGTCAATCTTACGTCGCACTACAACATCTACTAAAGATTTTCGTGAGTTAGTTGATGAGATTGCGATGTTAATGGGCTATGAAGTGTCTCGTGATTTGCCTTTAGAAGATGTTGAAATCCAAACACCAGTAGCGACAACTGTACAAAAACAATTAGCTGGGAAAAAGTTAGCAATTGTTCCAATTTTACGCGCAGGTATTGGTATGGTTGATGGTTTCTTAAGCCTTGTGCCAGCTGCTAAAGTTGGTCATATCGGTATGTATCGTGATGAAGAGACTTTCCAACCAGTCGAATATTTAGTTAAGTTACCTGAAGATATTGATCAACGTCAGATTTTTGTAGTTGATCCAATGCTTGCTACAGGTGGGTCTGCTATTTTAGCAGTAGATTCTCTAAAAAAACGTGGCGCAGCTAGTATCAAATTCGTTTGTTTAGTAGCAGCTCCAGAAGGAGTGGCAGCACTTCAAGAAGCACATCCAGATGTAGATATTTATACCGCTGCTTTGGATGAAAAACTCAATGAACATGGCTACATTGTTCCTGGACTCGGAGATGCTGGTGATCGCTTATTTGGTACAAAA

SEQ ID NO: 21254 - protein, 209 aa, Streptococcus agalactiae; identical to SEQ ID NO: 7558

SEQ ID NO: 21255 - protein, 1167 aa, Streptococcus agalactiae
ATGATTACATATGATTTCACAAGTTTACCAGAACGTTTTTCAAGTAATGCCATAAAATGGAAGGCGGTTCAAAAAGATCAAGAAATCCTTCCCCTTTGGATTGCGGATATGGATTTTCCTATCTTTCCAGAAATGTCGGAGGCTATTGAAGATTTTTCACACCAAATGGTTTTTGGCTATGATAGTCCTAAAGACAGTTTATACCAAGCTATCTCTAATTGGGAAGTGCAAGAACATGGTTATCAATTTGATAAAAAATCATTATTATTAATTGATGGGGTTATACCAGCGATTTCAGTTACCATACAAGCCTTCACAAAGGAGGGAGATGCTGTTCTAATTAATACCCCAGTCTATCCGCCCTTTGCTAGAACTATAAAATACAATAATCGTCATTTAGTTTCAAATAGTTTACTTAATAATAATCAGTATTTTGAGATTGACGTTAAACAATTAGAAAAAGATATCATTGAAAATAATGTAAAGCTTTATATTTTTTGTAGTCCACATAATCCCGGTGGGCGTGTCTGGACAAAAGGAGAAATTCAAAAAATAGGAGATATCTGTAAACGGTATAATGTTATCCTAGTTTCTGACGAAATACATCAAGATTTGGTATTATTTGATAATGTACACCATAGCTTTAATACTGTTGATTCTACTTTTAAAGAATTGAGTGTTATTTTATCTAGTGCAACTAAAACGTTTAATATTGCAGGGACTAAAAATAGTTTTGCAATAATTGAAAATGAAAAGTTACGCTCTGATTTTAAGAAGAGGCAAATAGCTAACAATCAACAAGAAATTTCCTCATTGGGGTTATTAGCTACAGAAGTTGCCTTTACAAAAGGGAAACAATGGTTAAAGGCCCTAAAAATGGAGTTAGAAGGATCAATAGAATACCTTTATGAGCAATTAACGCAAAAAACTCATATCAAAGTGATGAAACCAGAGGGAACTTATCTTGTTTGGTTAGATTTTTCTGCTTATAATTTAACGCATTTAGAAATTCAAGAAAAACTTCGATATGATGCCAAATTAATATTAAATGATGGTTTAACTTTTGGAAAAGAAGGGAAAAAACATGCTAGAATCAATGTCGCAGCTCCTAGGTCTGTTATTGAGGAGGCAGTTTTGCGATTAGTGACAAACTTTAGAAAAAATGAC

SEQ ID NO: 21256 - protein, 389 aa, Streptococcus agalactiae
MITYDFTSLPERFSSNAIKWKAVQKDQEILPLWIADMDFPIFPEMSEAIEDFSHQMVFGYDSPKDSLYQAISNWEVQEHGYQFDKKSLLLIDGVIPAISVTIQAFTKEGDAVLINTPVYPPFARTIKYNNRHLVSNSLLNNNQYFEIDVKQLEKDIIENNVKLYIFCSPHNPGGRVWTKGEIQKIGDICKRYNVILVSDEIHQDLVLFDNVHHSFNTVDSTFKELSVILSSATKTFNIAGTKNSFAIIENEKLRSDFKKRQIANNQQEISSLGLLATEVAFTKGKQWLKALKMELEGSIEYLYEQLTQKTHIKVMKPEGTYLVWLDFSAYNLTHLEIQEKLRYDAKLILNDGLTFGKEGKKHARINVAAPRSVIEEAVLRLVTNFRKND

SEQ ID NO: 21257 - protein, 546 aa, Streptococcus agalactiae
ATGAATATTGAAACATTAACGCAGAAAAATCATCGTTCCGATAGTGGACGAAATCATATTGTTTTATTTGAACCACAGATTCCAGCAAATACTGGTAATATTGCTAGAACTTGTGCGGCAACAAATGCTCCTTTGCACATCATACGACCGATGGGATTTCCTATTGATGATAAAAAAATGAAACGAGCAGGACTGGATTACTGGGATAAGCTAGATGTTAGTTTCTATGATAGTTTGGAAGAATTTATGTTGTCATGTCGTGGGAAAGTTCACCTAATTAGCAAATTTGCTGACAAGGTTTACTCAGATGAAAATTATAATGATGATCAAGACCATTATTTTATGTTTGGTCGTGAAGATAAAGGATTGCCAGAAACTTTTATGCGCGAGCATGCCGAAAAGGCCTTACGAATTCCCATGAATGATGAGCATGTGCGTAGCTTGAATGTTTCAAACACTGTTTGTATGATTGTTTATGAAGCCCTTAGGCAGCAAAGTTTTCCTAATTTAGAATTAAGCCATACTTATGAAAATGATAAATTAAAA

SEQ ID NO: 21258 - protein, 182 aa, Streptococcus agalactiae; identical to SEQ ID NO: 7562

SEQ ID NO: 21259 - protein, 441 aa, Streptococcus agalactiae
ATGCGTCTACCTCAAGCTTTTGCGGAACGCGGATGGATCAAAAGTGAGAGGATGGCTAACATAAATTTGAAGTATCAAATGTCATTGCCAGCTAGTTTGACGGTGACGGCTGTAGCTATTTTTTGGCTTTTTGTTCACTTTATGGTTACAAAATTTAATTTATTGCCGGGTAGTGATATTAGTGAAATTGCTGTGGTGTTTAATAATACCAGTTTAATCATTCTTTATGTTTTAGTACTCAGCCTTTATCTCAAAAAAGATATTAAAAATAAATTTACCGGCTTAGTTTCACCGATTCTAGCAATTTTAGGCGGTTTGATCCTCTTTATCGGGAGTTTGTTAAGTAATTTCTTTACGGTTTTAATTTTCCAATGTTTTTGCTTATTATTCTGTTTGATTTGTCATTATATCTATCAAAAAAATAACCCAAAAACTCATGAA

SEQ ID NO: 21260 - protein, 147 aa, Streptococcus agalactiae
MRLPQAFAERGWIKSERMANINLKYQMSLPASLTVTAVAIFWLFVHFMVTKFNLLPGSDISEIAVVFNNTSLIILYVLVLSLYLKKDIKNKFTGLVSPILAILGGLILFIGSLLSNFFTVLIFQCFCLLFCLICHYIYQKNNPKTHE

SEQ ID NO: 21261 - protein, 660 aa, Streptococcus agalactiae
ATGGAGAATCATAATTCTATTAAACAGACCTATGGATTAATGACTACAATTGCTATGATTGTAGGTGTAGTGATTGGTTCAGGCATTTATTTTAAAGTTGATGACATCCTTAAATTTACTGGTGGAGATGTCTTTTTAGGCATGGTAATTTTAGTACTAGGTTCTTTTTCGATTGTTTTTGGAAGTTTGTCAATTTCTGAGCTAGCTATTAGAACGAGTGAAAGTGGTGGTATTTTTTCTTACTACGAAAAATATGTTAGCCCAGCTTTAGCAGCAACTTTAGGCTTGTTTGCGTCTTTTTTGTATCTTCCAACTTTAACAGCAATCGTTTCATGGGTAGCTGCATTTTATACTTTAGGTGAATCATCAAGTTTGGAATCACAGATTATTTTAGCTGCTGTTTATATTTTAGCGCTTAGTCTCATGAATATCTTTGCTAAGCGTATTGCAGGGGGATTCCAATCTTTAACGACCTTTGTAAAAATGATTCCTTTAGTCCTAATTGCTTTAATTGGTGCTTTTTGGTCTGATAAAGCTCCACAACTTCCACAACATTTAACAGCTATACGTCAAATGTTGGATGGAGTTGGGTGTCAGGTCTGGTACCATTGTATTTTGCATATGATGGTTGGACAATTTTTGTTAGTATTGCACNNNNNT

SEQ ID NO: 21262 - protein, 221 aa, Streptococcus agalactiae
  VARIANT 189, 220, 221: Xaa = Any Amino Acid
MENHNSIKQTYGLMTTIAMIVGVVIGSGIYFKVDDILKFTGGDVFLGMVILVLGSFSIVFGSLSISELAIRTSESGGIFSYYEKYVSPALAATLGLFASFLYLPTLTAIVSWVAAFYTLGESSSLESQIILAAVYILALSLMNIFAKRIAGGFQSLTTFVKMIPLVLIALIGAFWSDKAPQLPQHLTAXHRQMLDGVGCQVWYHCILHMMVGQFLLVLHXX

SEQ ID NO: 21263 - protein, 1347 aa, Streptococcus agalactiae
ATGAGAATAATTGTTGTCGGCGGAGGTAAAGTCGGAACCGCACTTTGTCGCTCACTTGTTGCTGAAAAGCACGATGTTGTTTTAATTGAGAAAAAAGAAAACGTCCTTAAACGTGTCACTAAACAGCATGATATTATGGGAATTGTTGGGAATGGGGCAAACTATAAAATTTTAGAACAAGCCGAAGTCAAAAATTGTGATATTTTTATCGCTATCACTGATCGAGATGAAGTTAATATGATTTCAGCAGTTCTTGCCAAAAAAATGGGGGCAAAAGAGACTGTTGTTCGCATGCGTAATCCTGAGTATTCTAATCCTTACTTCAAAGATAAAAACTTTCTTGGCTTCTCTTCAGTTGTCAACCCTGAATTGTTAGCAGCACAATATATCGCTAATACCATAGAATTTCCAAATGCAACTTCAGTTGAACATTTCGCCAACGGGCGTGTGATGTTAATGGAATTTAAAATTTTAGAAGGAAATAAACTCTGTCATACTTCAATGAGTCAAATTCGTAAAAAATTTGGTAATATTGTTATTTGCGCAATTGAACGCGATGGCAAATTGATTATTCCTGATGGCGATGCAACTATCCAAGTCAAAGATAAAATCTTTGTAACTGGAAACCGTATTGAAATGATACTTTTCCATAATTACGTTAAAAATAAAGTTGTCAAAAACTTGATGGTTATCGGTGCAGGACGCATCGCCTACTACCTACTCAATATCCTTAAAAATACCAATACACACGTCAAACTAGTTGAACTCAACCAAGAACAAGCTGAATATTTTAGTCAAGAATTTCCCAATGTTCCTGTCGTTCATGGGGATGGTACTGCTAAAAATATTTTGTTAGAAGAAAGCGTTACAAGTTTTGACGCAGTTGCTACTTTAACTGGTGTTGATGAAGAAAATATCATTACCTCAATGTTCTTAGAAAGTATCGGTATTCCTAAAAACATTACCAAAGTTAATCGAACTAGCCTACTAGAAATCATTGACGATAAACAACTATCAAGCATTATCACACCCAAGCGTATTGCCGTAGACCATGTGATGCACTTTGTACGCGGGCGTGTAAATGCTCAGGATTCCAACCTAGAAGCTATGCATCATATTGCTAACGATCGCATTGAAACCTTACAATTTGAAATAAAAGAAACTAGCAAATTAGCAAATCGTAGTCTTGCATCTTTAAAATTAAAGCAAAATATTTTAATTGCAGCGATTATTCGCAATAATAAAACGATTTTCCCAACTGGTGAGGATGTTTTAACAGTGGGTGATCGTATCGTTGTTATCACCTTATTAAAAAATATTACTAGAACTAGTGATATGTTAGCGAGG

SEQ ID NO: 21264 - protein, 449 aa, Streptococcus agalactiae; identical to SEQ ID NO: 2932

SEQ ID NO: 21265 - protein, 1425 aa, Streptococcus agalactiae
ATGATTCGTTTCCTCCTCTCAAAACTTTTGCTGATTGAAGCTGCTCTTCTAGCGATTCCTCTAACTGTTGGACTTATTTACCGTGAACCGCAAAGTGTCATGATGAGTATAGTCATTACCATGATTATTCTAATCATCCTTGGATTACTGGGTTCTCTCTTTAAACCTAAAAATTATCATATCTACACTAAGGAAGGCATGTTAATTGTTGCACTCTGCTGGATACTTTGGTCCTTCTTTGGCGCCCTTCCATTTGTTATTTCAGGACAAATCCCTAATATTATCGATGCTTTCTTTGAAGTATCTTCTGGTTTTACGACAACAGGAGCAACTATTCTTGATGACGTCAGTGTCTTATCCCCCGCGCTCTTATTTTGGCGTAGTTTTACCCATCTTATCGGTGGAATGGGGGTTTTAGTATTTGCCCTTGCCATCATGGAAAATTCTAAAAATAGCCATTTAGAGGTTATGAGAGCTGAAGTTCCTGGACCTGTATTTGGTAAAGTTGTCTCGAAACTTAAAAAAACTGCACAAATTTTGTATCTGTTATATCTTCTTATGTTTGCAGTATTTGCAGTAATATTATATTTTGCAGGTATGCCTTTCTTTGATAGTATTATCATAGCGATGGGAACTGCAGGTACAGGTGGTTTTGCAGTTTACAATGATAGCATTGCCCATTATAATAGTCCTCTGATAACTAACTTAGTTTCTATTGGTATGCTTATCTTCGGGGTTAACTTTAATCTTTACTATCTTCTTTTACTCCGAAAAATTAAAGCATTCTTTGGTGATGAGGAACTAAAAACCTATCTCCGCATCGTGGCAATAGCAACTTTCATGATTGCTCTAAACGTCATCGGTATGTATGATAATTTTCGACAAGGCCTCGAACATATTTTCTTTGAAGTATCAGCTATTATTACGACAACTGGTTTTGGCGTGACTGATATCACTCGTTGGCCTTTGTTTTCACAGGTTATTTTGCTATTCTTGATGTTTATCGGTGGTTCTGCTGGCTCTACAGCTGGGGGCTTTAAAGTCATGCGTAGCTTAATCCTAGCAAAGATTGCACGTAACCAAGTATTGTCTACACTCTATCCTAATAGAGTCATGTCACTACACATTAATAAAAGCGTTCTAGATAAAAATACACAACATGGCGTTTTAAAATATCTAACTATCTATTTAGCTATCTTCATGGCACTCGTTCTTGTTTTAACGCTTGATACTAATGATTTTTTGGTTGTTGTCAGTGCTGCAGCCTCATGTTTTAACAACATAGGCCCACTCTTAGGTAGCAATGAAACTTTCTCATTCTTTAGTCCATTCTCAAAACTCCTTCTTTCATTTGCTATGATAGCAGGACGTTTAGAAATATACCCTGTTTTATTGATGTTTATTCCTAAAACATGGTCAAAACTA

SEQ ID NO: 21266 - protein, 475 aa, Streptococcus agalactiae
MIRFLLSKLLLIEAALLAIPLTVGLIYREPQSVMMSIVITMIILIILGLLGSLFKPKNYHIYTKEGMLIVALCWILWSFFGALPFVISGQIPNIIDAFFEVSSGFTTTGATILDDVSVLSPALLFWRSFTHLIGGMGVLVFALAIMENSKNSHLEVMRAEVPGPVFGKVVSKLKKTAQILYLLYLLMFAVFAVILYFAGMPFFDSIIIAMGTAGTGGFAVYNDSIAHYNSPLITNLVSIGMLIFGVNFNLYYLLLLRKIKAFFGDEELKTYLRIVAIATFMIALNVIGMYDNFRQGLEHIFFEVSAIITTTGFGVTDITRWPLFSQVILLFLMFIGGSAGSTAGGFKVMRSLILAKIARNQVLSTLYPNRVMSLHINKSVLDKNTQHGVLKYLTIYLAIFMALVLVLTLDTNDFLVVVSAAASCFNNIGPLLGSNETFSFFSPFSKLLLSFAMIAGRLEIYPVLLMFIPKTWSKL

SEQ ID NO: 21267 - protein, 249 aa, Streptococcus agalactiae; identical to SEQ ID NO: 11803

SEQ ID NO: 21268 - protein, 83 aa, Streptococcus agalactiae; identical to SEQ ID NO: 2936

SEQ ID NO: 21269 - protein, 720 aa, Streptococcus agalactiae; identical to SEQ ID NO: 11805

SEQ ID NO: 21270 - protein, 240 aa, Streptococcus agalactiae; identical to SEQ ID NO: 2938

SEQ ID NO: 21271 - protein, 582 aa, Streptococcus agalactiae
ATGACTTATTTAGGCTCAATAGAAGCTCTTCTTTTTGTTGCAGGTGAAGATGGACTGAGTTTGCGTCAAATGGCAGAATTATTGTCTTTGACACCATCAGCATTAATACAGCAACTAGAAAAGTTGGCTAAACGATATGAAGAAGATGACGATTCTAGTCTATTATTGCTTGAGACAGCACAAACTTATAAATTGGTAACAAAGGATAGTTATATGACTTTGTTGAGAGATTATGCGAAGGCTCCTATTAATCAGAGTCTATCTCGGGCAAGTTTGGAAGTTCTATCTATTATTGCTTATAAACAACCTATTACTAGGATTGAAATTGATGATATTCGTGGCGTGAATTCCAGTGGAGCTATAACGAGACTGATAGCTTTTGGTTTAATTAAAGAGGCTGGAAAGAAAGAAGTGTTGGGACGTCCTAACCTTTATGAGACAACTAATTATTTCTTAGATTATATGGGAATTAATCAGTTAGATGACTTAATTGACGCCTCTTCAATTGAATTAGTTGACGAAGAAGTATCGTTATTTTCAATGGATTCAATTAATACAGAAGATAAGGAAAACAATGAGAAT

SEQ ID NO: 21272 - protein, 194 aa, Streptococcus agalactiae; identical to SEQ ID NO: 7576

SEQ ID NO: 21273 - protein, 705 aa, Streptococcus agalactiae; identical to SEQ ID NO: 11809

SEQ ID NO: 21274 - protein, 235 aa, Streptococcus agalactiae; identical to SEQ ID NO: 11810

SEQ ID NO: 21275 - protein, 777 aa, Streptococcus agalactiae; identical to SEQ ID NO: 11811

SEQ ID NO: 21276 - protein, 259 aa, Streptococcus agalactiae; identical to SEQ ID NO: 2944

SEQ ID NO: 21277 - protein, 471 aa, Streptococcus agalactiae; identical to SEQ ID NO: 11813

SEQ ID NO: 21278 - protein, 157 aa, Streptococcus agalactiae; identical to SEQ ID NO: 11814

SEQ ID NO: 21279 - protein, 519 aa, Streptococcus agalactiae; identical to SEQ ID NO: 11815

SEQ ID NO: 21280 - protein, 173 aa, Streptococcus agalactiae; identical to SEQ ID NO: 11816

SEQ ID NO: 21281 - protein, 795 aa, Streptococcus agalactiae
ATGACTTCGGATTTTCAATTATTAGCATTCCTCGTTGATATGATTAATCAAGAGTATTCAAGGCACATCAAAGTGACTCAACATAAAGGGGCCATCTTAGTTAGTGAAGATGATCAGTTGTTCTTAGTTCACTTACCTAAAGAGGGCACTTCTTTAGAAAAATTCTTTGATTTAAAGAATGATAATAATTTTGGGGATACCATATTAATTGCGACTCACAATGAAGGAAAAACGAAGGAATTTAGAGAATTATTTGGGAAATTAGGACTCAAAGTTGAAAATTTAAATGATTACCCAGATTTACCAGAAGTTGAAGAGACTGGTATGACCTTTGAAGAAAATGCTCGACTTAAAGCAGAGACTATTTCAAAATTAACTGGGAAAATGGTAATTTCAGATGATTCCGGATTAAAAGTAGATGCTTTAGGTGGTTTACCAGGGGTATGGTCTGCTCGTTTTTCAGGTCCTGACGCGACAGATGCTCGTAATAATGCCAAATTATTGCATGAATTAGCCATGGTATTTGACAAAGAAAGACGTTCAGCACAGTTTCATACAACCTTAGTCGTGTCAGCTCCAAATAAAGAAAGTTTGGTAGTTGAAGCAGAGTGGCCAGGTTATATTGGTACGGAACCTAAGGGGGAAAATGGCTTTGGTTATGATCCACTCTTTATTGTTGGAGAAGGTAGTAGGACAGCAGCTGAATTGAGCGCACAAGAAAAAAATAATCTATCACATCGTGGGCAAGCTGTCCGTAAATTGATGGAGGTATTTCCAAAATGGCAATTAGAAAAT

SEQ ID NO: 21282 - protein, 265 aa, Streptococcus agalactiae
MTSDFQLLAFLVDMINQEYSRHIKVTQHKGAILVSEDDQLFLVHLPKEGTSLEKFFDLKNDNNFGDTILIATHNEGKTKEFRELFGKLGLKVENLNDYPDLPEVEETGMTFEENARLKAETISKLTGKMVISDDSGLKVDALGGLPGVWSARFSGPDATDARNNAKLLHELAMVFDKERRSAQFHTTLVVSAPNKESLVVEAEWPGYIGTEPKGENGFGYDPLFIVGEGSRTAAELSAQEKNNLSHRGQAVRKLMEVFPKWQLEN

SEQ ID NO: 21283 - protein, 263 aa, Streptococcus agalactiae
ATGACAAAAACAATTTTTGAAGTAAAACTGAAGGCAATTGGTTTTTAGGTAGTTTCCAAGCTTTTAATTATTTTACTTGTTTTGGTAATGATGAATCTTACGAAGCTATCCAAGATGTTTTTCATCGTCTATTATCAACTTTGAAAGTTGAAGGTCTACAGCTTCACGTTGTGCAGATGACTTCGGATTTTCAATTATTAGCATTCCTCGTTGATATGATTAAATCAGAGTATTTCAGGCACATCAAAGTGACTCAANNNNNT

SEQ ID NO: 21284 - protein, 88 aa, Streptococcus agalactiae
  VARIANT 8, 87, 88: Xaa = Any Amino Acid
MTKTIFEXKTEGNWFLGSFQAFNYFTCFGNDESYEAIQDVFHRLLSTLKVEGLQLHVVQMTSDFQLLAFLVDMIKSEYFRHIKVTQXX

SEQ ID NO: 21285 - protein, 792 aa, Streptococcus agalactiae
ATGGATAGTAGGCCTATTGGCTTTCTAGATTCTGGTGTAGGTGGTTTAACGGTTGTTAAGGAAATGTTCCGTCAACTTCCAGAAGAGGAAGTAATCTTCATTGGAGATCAGGCTAGAGCTCCGTATGGTCCTAGACCTGCTCAACAGATTAGAGAGTTTACCTGGCAGATGGTTAATTTCTTATTGACTAAAAATGTTAAGATGATTGTTATAGCTTGTAATACAGCAACTGCAGTTGCCTGGCAAGAAATTAAAGAAAAACTAGACATACCTGTTTTAGGCGTTATTTTACCAGGAGCTAGCGCAGCTATCAAATCAACTAATTCAGGGAAAGTTGGTATTATAGGTACTCCCATGACTGTTAAATCAGATGCTTATCGTCAAAAAATTCAAGCTTTGTCTCCAAATACTGCTGTGGTATCCCTTGCTTGTCCGAAATTTGTTCCAATTGTGGAATCAAATCAGATGTCTTCTAGTTTAGCCAAAAAGGTGGTTTATGAAACGTTGTCCCCATTAGTTGGTAAATTAGATACTTTAATTTTAGGTTGCACGCATTATCCCTTATTACGTCCCATCATTCAAAATGTTATGGGGGCTGAGGTTAAATTAATTGATAGTGGCGCAGAAACCGTTCGTGATATTTCTGTTTTATTGAACTATTTTGAGATAAACCATAATTGGCAAAATAAACACGGTGGTCATCACTTTTACACAACCGCCAGCCCAAAAGGTTTTAAAGAAATTGCAGAACAATGGCTTAGTCAAGAAATAAATGTGGAGCGTATAGTATTA

SEQ ID NO: 21286 - protein, 264 aa, Streptococcus agalactiae; identical to SEQ ID NO: 7590

SEQ ID NO: 21287 - protein, 539 aa, Streptococcus agalactiae
ATGTCAAAAAAAACAACACAAATGGTTTCTTATACTTCTATTTTAGTAGCTTTTGCAATCATGATTCCTATAATCATGCCTGCTAAAATAATTATTGGGCCTGCTTCTTTCACCTTAGCAAGCCATGTACCTTTATTTTTAAGTATTTTTATATCTGTTCCAGTTGCAATATTAGTAGCTTTAGGGACAGGACTTGGATTTCTACTAGCTGGTTTTCCGATGTAATCGTTCTTAGAGCTTTATCACATATCGGATTTGCATTAATTGCGGCTTTCTTGATTAAGTCAAAGCCCTCTTTATTGATGAGTAAATGGCAAACATTGTTATTTGCTGTAGCTATTAACATAATTCATGGTCTGATCGAATTTATTACTGTTTATATAATCACAATGACTTCTAACAGTAGTTCAACTTATTTATGGTCACTATTTTCTTTGATAGGGCTAGGCTCTTTGCTACATGGATTGGTAGATTTTTATATAGCTCTCTTCATTTGGAAATGGATGACACAAAAGTTGGGGAAAACACTTAGGATAAGA

SEQ ID NO: 21288 - protein, 180 aa, Streptococcus agalactiae
MSKKTTQMVSYTSILVAFAIMIPIIMPAKIIIGPASFTLASHVPLFLSIFISVPVAILVALGTGLGFLLAGFPIVIVLRALSHIGFALIAAFLIKSKPSLLMSKWQTLLFAVAINIIHGLIEFITVYIITMTSNSSSTYLWSLFSLIGLGSLLHGLVDFYIALFIWKWMTQKLGKTLRIR

SEQ ID NO: 21289 - protein, 519 aa, Streptococcus agalactiae
ATGAAGGCACAGGAGCGTCGAGAAAATATTTTAACGACTTTAAAAGGAACAAAAGAAGCTATATCGGCAAGCACATTAGCAAAGATTTTTAGTGTTAGTAGGCAGGTGATTGTTGGAGATATTGCCTTATTGCGTGCACAACAATGTGATATTATTTCTACCCCAAAAGGATACCTCATGTCCAGTGCTCTAAGTACTCATCAATTCACTGCTAGATTGGTTTGTCAGCATGGCATAGAACAGACAGAAGAAGACCTGGAAATTATTTTGCGGTATCAAGGAATCATTATGAATGTGGAGGTAGAGCACCCTATTTATGGGATGCTGACTGCTCCCTTAAACATTCAAAGCCAAAAAGACATTGATAATTTTACTGCTAAATTAAAAGTTTCCAATGCAGAATTGCTATCCTCTTTGACAGATGGTTTACATACACATATGATTTCTTGTCAAGATCAGTCAGTTTTTGACCAAATATGTGAGGCTCTAAAAAAAGCAGGAATTTTATACATAGACAAA

SEQ ID NO: 21290 - protein, 173 aa, Streptococcus agalactiae
MKAQERRENILTTLKGTKEAISASTLAKIFSVSRQVIVGDIALLRAQQCDIISTPKGYLMSSALSTHQFTARLVCQHGIEQTEEDLEIILRYQGIIMNVEVEHPIYGMLTAPLNIQSQKDIDNFTAKLKVSNAELLSSLTDGLHTHMISCQDQSVFDQICEALKKAGILYIDK

SEQ ID NO: 21291 - protein, 564 aa, Streptococcus agalactiae
ATGTTTCCACAAAATATGATTGCCATCATGCAAAAAATGCCAGGGTTGTATTTTGGAGCAATCATCTTAGAATTGGTTTTAGTCTTTGTTGCTAGTGGAGCGGCGCGTCGAAACACACCAGCTGCATTACCATTATTTTTGATTTATTCAGCTTTGAATGGGTTTACTTTAAGTTTCATTATCGCAAGGTACACGCAAACAACAGTTCTTCAAGCTTTTATAACATCTGCAGCTGTTTTCTTTGCAATGGCTTTGATTGGAGCTAAGACTAAAAAAGATTTATCAGGTATGCGTAAAGCGTTAATGGCTGCTTTAATTGGGATTTTAATTGCAAGTCTTGTTAATTTATTTATCGGTAGTGGGGGGATGAGTTATATCATTAGTATCGTATATGTCATCATCTTTTCTGGATTGATTGCTTACGATAACCAAATGATTAAATATGTCTACAATAGCCAAGGCGGCCAAGTCGCAGATGGTTGGGCAGTTTCGATGGCACTAAGCCTTTATCTTGATTTTATTAATCTATTCTTAAATATTCTTCGTCTTTTTGCACGAAATGAT

SEQ ID NO: 21292 - protein, 188 aa, Streptococcus agalactiae
MFPQNMIAIMQKMPGLYFGAIILELVLVFVASGAARRNTPAALPLFLIYSALNGFTLSFIIARYTQTTVLQAFITSAAVFFAMALIGAKTKKDLSGMRKALMAALIGILIASLVNLFIGSGGMSYIISIVYVIIFSGLIAYDNQMIKYVYNSQGGQVADGWAVSMALSLYLDFINLFLNILRLFARND

SEQ ID NO: 21293 - protein, 499 aa, Streptococcus agalactiae
ATGAAAAAGTATCAAGACGATAAGGACTTCATGGATTTGGTCGGTCACCTTATTGACCATCCACGTTTCCAAAAACTCGAAGCTATTGTCCAACATCATCACTCAACTCGCTTAGAGCATTCTATAAATGTTAGTTATACAAGTTATAAAATTGCTAAGAAGTTTGGTTGGGATGCGAGTAGTACTGCTCGAGGTGGTTTACTACATGATTTCTTTTATTATGATTGGCGTGTAACGAAATTTACAAGAGCCATGCCTGGGTTCATCAAGGATAGCGGTTCGTAATGCGCGAAAATTAACTGATTTAAACGCTAGAGAAGAAGATATTATTTTGAAACACATGTGGGGAGCGACTATTGCACCACCACGTTATAAAGAAAGTTATATTGTGACTATGGTTGATAAGTATTGGGCAGTACGAGAGGCTTCTCGTCCACTCAAACGTATTTTTAAGAAACCTATCCGTTTTAGTCGCAAATTCTTAGGTAGTCACAATCAT

SEQ ID NO: 21294 - protein, 167 aa, Streptococcus agalactiae; identical to SEQ ID NO: 2962

SEQ ID NO: 21295 - protein, 741 aa, Streptococcus agalactiae
ATGACTACTATTATAACTTCAAAATCAAATAATCTCATTAAAAAAACGAAAAAGTTGTTACAAAAAAAATATCGGAAATCTTCATATCTTATTGAAGGCTGGCATTTATTTGAGGAAGCTGAAAAATATGGTGCACAATTTTTAAATATTTTTGTGACAGAAACGGCAATAGATCGTTTGAGAAAACCCGAGAGAGCTATTGTTGTTACAGATGATGTTTTGAAAGAATTAACTGACTCACAGACTCCTCAAGGGATTGTAGCTGAGATTGCCTTTCAAGAGACAAGATGGACAGATATTAAAAAAGGACGTTTTCTTGTATTGGAAGATGTGCAGGATCCAGGAAACCTAGGAACAATGGTTCGAACTGCAGATGCAGCGAATTTTGATGCTGTTTTTTTATCTCAGAAATCTGCTGATTTGTATAACCAAAAAACACTTCGTTCTATGCAAGGCAGTCACTTTCATTTACCAGTATTTAGGGTAGAAATAGAGCAGTTTGTTAACTTTTGTAAAGCAGAAGGGATAACTATGATTGCCACAACTTTATCTGAACAATCGGTAAATTATAAAAATCTCCCTAAATATGATTATTTTGCTTTAATCATGGGAAATGAGGGACAGGGAATTTCCAAAACTATGACAGAAGAAGCAGATGTTTTAGCACATATTGAAATGCCTGGACAAGCAGAAAGTCTTAATGTAGCAGTAGCTGCGGGAGTAGTCATTTTCAGCTTAATT

SEQ ID NO: 21296 - protein, 247 aa, Streptococcus agalactiae; identical to SEQ ID NO: 2964

SEQ ID NO: 21297 - protein, 276 aa, Streptococcus agalactiae; identical to SEQ ID NO: 11835

SEQ ID NO: 21298 - protein, 92 aa, Streptococcus agalactiae; identical to SEQ ID NO: 11836

SEQ ID NO: 21299 - protein, 797 aa, Streptococcus agalactiae
ATGGCCAACCTCATTACTTATTTCGCTCAACACCAAGGGCTTGGTTTTGGTGTCGCTATCATTATTGTAACTATCATCGTACGTGTCGTTATCTTACCACTTGGACTTTATCAGTCTTGGAAAGCTAGCTATCAAGCTGAAAAAATGGCGTACTTTAAGCCTTTATTCGAACCTATCAATGAACGACTACGCAATGCTAAAACACAAGAAGAAAAATTAGCAGCTCAGACAGAATTAATGACAGCTCAACGTGAGAATGGCCTTAGCATGTTTGGCGGTATGGCTGCTTGCCATTACTCATTCAGATGCCATTTTTCTCAGCTATTTTCTTTGCTGCACGCTATACTCCTGGAGTCTCTAGTGCAACCTTCTTGGGACTTAACTTAGGTCAAAAGAGTCTGACACTTACTGTCATTATCGCCATTCTTTATTTTGTACAATCTTGGTTGTCAATGCAAGGTGTTCCAGATGAACAACGTCAGCAAATGAAAACAATGATGTATCTGATGCCAATAATGATGGTATTCATGTCTATTAGTTTACCTGCTAGTGTTGCGCTTTATTGGTTTATTGGTGGTATTTTCAGTATTATCCAGCAGCTAGTTACGACTTATGTACTTAAGCCTAAACTACGCCGAAAAGTAGAAGAAGAATATACTAAAAATCCTCCTAAAGCCTACAAAGCTAATAACGCACGAAAAGATGTTACAAATTCAACTAAAGCTACTGAATCTAATCAAGCAATTATTACATCTAAAAAAACAAATCGTAACGCCGGAAAACAAAAAAGACGGGGA

SEQ ID NO: 21300 - protein, 266 aa, Streptococcus agalactiae; identical to SEQ ID NO: 11838

SEQ ID NO: 21301 - protein, 663 aa, Streptococcus agalactiae
GTGATAAACTGGGATGCCATTTTTAATTTGGAACTAGCTGTTAAGGCTTTTCCAAGTGTTATTCAGGGGTTACCATATACCATTGGATTATCCTTGGTTGGCTTTATTTTAGGAGCTATCGTAGGATTCTTTGTAGCTCTAATGAAGATGTCTCATTTCCGCTTACTGAGGTATCTAGCTAATATTCATATTTCCTTAATGCGTGGGATTCCTTTAATGGTTCTACTCTTTCTTATCTATTTTGGTTTGCCTTTTATAGGGATACAGTTAGATGCTGTGACTGCTTCTATCGTAGGTTTTACCATGATGTCTAGTGCATATATATCAGAAATTATCAGAGCAGCTCTTTTAGCTGTTGATCATGGTCAGTGGGAAGCTGCTAGAGCTCTAGGGTTAAAAACACCGACGATTTATAGAGGCATTATTATTCCGCAAGCAACAAGAATTGCACTCCCTTCTTTAAGTAATGTTTTGCTAGATATGGTTAAGGGTTCCTCATTGACTGCGATGATTACGGTACCTGATATCTTTAATAATGCTAAAATAGTTGGGGGAACCTACTCCGACTATATGACCGCCTATATCTTAGTAGCCCTTATCTATTGGGTAATTTGTACGCTTTATGCAATTATTCAAGACTGGTGGGAAAAACGATTACTTTAT

SEQ ID NO: 21302 - protein, 221 aa, Streptococcus agalactiae; identical to SEQ ID NO: 11844

SEQ ID NO: 21303 - protein, 855 aa, Streptococcus agalactiae
ATGAAAAAGACAATTTTACTTGGTTTAGTCGGTTTATCTGCAATGACATTAGCAGCTTGCTCAAATGGTCAATCTAGCAAAGAAACAACATGGGACAATATTAAAAAAGATGGTGTCCTTAAGGTTGCTACCCCTGCAACGCTTTATCCAACAAGTTATTATGATGACCATAAAAAATTGACTGGTTATGAGATTGATATGATGAAAGCGATCGCTAAAAAACTTAAGATAAAAGTTAAGTTTGTTGAAGTTGGAGTTGCTGAATCATTTACTTCTGTAGATAGTGGCAAGGTGGATGTTGCTGTCAATAACTTCGACACAACTCCCGAGCGTTTGAAAAAATACAATTTCTCTCAACCTTATAAATATTCTGTTGGAGGTATGATTGTACGTGCAGATGGTTCTTCAAAGATTACAGCAAAAGATTTATCTGACTGGAAAGGTAAAAAAGCTGGTGGTGGCGCTGGAACGCAATATATGAAAATTGCAAAACAGCAAGGTGCTGAACCTGTTATTTATGACAATGTAACTAATGACGTTTACCTTCGAGATGTATCAACTGGACGTACAGATTTCATTCCGAATGATTACTACACACAAGTCATTGCTGTAAAATATGTAACAAAACAATATCCAGATATCAAAGTAAAAATGGGTGATGTGAAGTATAATCCGACTGAGCAAGGTATTGTGATGAGTAAAAAAGATAAGAGCCTCAAAACAAAAATTGATGCAGCTATCAAGGATATGAAGAAAGACGGTTCTTTGAAAAAAATCTCTGAAAAATATTATGCTGGTCAAGATCTCACAAAAGAACCTGCTGGAACAGATAAAATTCCAGTAATTAAAGTTAAA

SEQ ID NO: 21304 - protein, 285 aa, Streptococcus agalactiae; identical to SEQ ID NO: 2972

SEQ ID NO: 21305 - protein, 1458 aa, Streptococcus agalactiae
ATGGTTTTTAAAGATGCTACCGCTATGGCACAAGCGATAAAACAGCATAAGATTTCGTCGCAAGAATTAGTAGAGCAAGCAATCTACAAGATCGAGGAACAGAATGTAAGCGTTAATGCTGTTGTCAGCAAGCAATATAATGAGGTGCGTCAAGCAGCCAAATACGCAAATGAATCAAATGCTCCTTTTGCAGGAGTTCCTATTCTTCTGAAAGATTTGGGACAGAATCAAAAAGGACAACTCTCAACCTCAGGTTCACAATTATTTAAACACTATTATGCTAAACAAACGGACTATTTAGTGCAGTCCTTTGAAAAATTAGGGTTTATTATTTTAGGAAGAACAAATACCCCTGAATTTGGTTTTAAGAATATTAGTGATAGTCAACTTCACGGGAATGTTAATCTTCCATTTGACCATTCAAGAAATGCTGGAGGCTCTAGTGGTGGTGCAGCCGCAGCTGTTAGTTCAGGAATGGTTCCAATTGCAGGAGCTAGTGATGGAGGAGGGTCAATCAGAATTCCAGCAAGTTTTAATGGTTTGATTGGTTTAAAACCGAGTCGAGGACGTATACCTGTTGGACCTTCATCCTATAGAGGTTGGCAAGGGGCTTCCAGTCATTTTGCTTTAACAAAGTCAGTTAGAGATACAAAACGACTATTATATTATTTACAATCATATCAAGTAGAAAGTCCATTTCCCCTGAAAAAACTCAGCAAAGAGAGTCTTTTCGAGTTTAGCGTTAGTAAACCCCTAAAAATAGCAGTATTGATGGATTCTCCCCTAAAAACAAAGGTATCAAGTGAGGCTAAAGCAGCTATTAAAGAAGCCGCAGATTTTCTGTCTCAAAAAGGGAATCATTTAGAATTAGTAGAACAACCTTTAGATGGTATTTATTCTATGAAAACTTATTGTATGATGAATAGCGTTGAAACAGCAGCAATGTTTGATGACATCGAAAAGAGTTTAGGGCGTTCAATGGAATTTAGCGATATGGAATTAATGACCTGGGCTATGTATCAGAGTGGACAAAGAGTATTGGCTAAAGATTACAGTAAACTCTTAGATTCATGGGATCAATTTGCAGCCACCATGGCGAGGTTTCATGAAAATTATGATTTAATTTTAACAGCAGCAACTAATCAACCAGCTCCTTTTCATGGACAATTTGATTTAGACGAGACACTCCAGAAACAATTGAGGCATATGGGAGAATTCTCAGTAAGTGAACAACAGGATTTAATTTGGAAAATGTTTGAAGACTCAATGGCCTGGACACCTTTTACACATCAGCCAAACTTGACTGGGCAACCTTCTTTAGCCATACCAACTCATCTAACTAAAGAGGGGCTACCTTTAGGTGTACAATTGACAGCGGCTAAAGGGAGAGAAGATTTATTACTTGCTGTTGCAGAGTTGTTTGAAAAAGAGAAGCAATTCAAAGGGCCTGTTTACCAT

SEQ ID NO: 21306 - protein, 486 aa, Streptococcus agalactiae
MVFKDATAMAQAIKQHKISSQELVEQAIYKIEEQNVSVNAVVSKQYNEVRQAAKYANESNAPFAGVPILLKDLGQNQKGQLSTSGSQLFKHYYAKQTDYLVQSFEKLGFIILGRTNTPEFGFKNISDSQLHGNVNLPFDHSRNAGGSSGGAAAAVSSGMVPIAGASDGGGSIRIPASFNGLIGLKPSRGRIPVGPSSYRGWQGASSHFALTKSVRDTKRLLYYLQSYQVESPFPLKKLSKESLFEFSVSKPLKIAVLMDSPLKTKVSSEAKAAIKEAADFLSQKGNHLELVEQPLDGIYSMKTYCMMNSVETAAMFDDIEKSLGRSMEFSDMELMTWAMYQSGQRVLAKDYSKLLDSWDQFAATMARFHENYDLILTAATNQPAPFHGQFDLDETLQKQLRHMGEFSVSEQQDLIWKMFEDSMAWTPFTHQPNLTGQPSLAIPTHLTKEGLPLGVQLTAAKGREDLLLAVAELFEKEKQFKGPVYH

SEQ ID NO: 21307 - protein, 480 aa, Streptococcus agalactiae; identical to SEQ ID NO: 16489

SEQ ID NO: 21308 - protein, 160 aa, Streptococcus agalactiae; identical to SEQ ID NO: 2976

SEQ ID NO: 21309 - protein, 1800 aa, Streptococcus agalactiae
TTGACCGAATTTAATGACGATCAGCATTCTAACCATGATCAGAAAAGTTTTAAAGAACAAATTCTGGCAGAGTTAGAAGAAGCTAACCGTTTGAGAAAGTTGCGTGAAGAAGAACTCTATCAAAAAGAGCAAGAAGCCAAAGAAGCTGCTCGCAGAACAGCACAATTGATGGCAGATTATGAAGCGCAACGTTTGAAAGACGAACAAGAAGCTAGAGCAAAGGCGCTAGAGACTAAGCAACGCTTAGAAGAGCAAGAGAAGGCTCGGATTGAGGCGAAACTTCAGGCAGAAGCTGCTCGAGAAGAAGAAAGACGTCAGGCGGAACAAGCATTAGCTTCCCAAGAAGAACAAGTTATCAATCAAGGGATGGAACCTTCAAGAGAGCTTGATAGCGGCTCCAAATCTAGTGAATTTAGGACAACTGAAAATGTACCTGAAATAGATTTAAAAGCAGATAAGACTGATGTTGCAACTGCTGTGCCTAATCAAGAAACGGAAGAAATCTTTCTTGTGAGAGCAACAGATATTCCTACAGAAGGTGAAAATGTAAAACTTGGTGAGACATCAGAGTTAGAGCCCATAGCAAAGGAACCTATCCGAGTAGAGGATTTGCCAAAAGAAGAAGAGGGTATAGCTTTGTCAGCCAAGAAGAAACATAACAAGCGTGAAAGACGTCAGAAAGCAGATAATGTGGCAAAACGAATTGCACGTATTCTGATATCAATTATCATACTTGTATTGCTCTTGACAGCATTTGTAGGTTATCGTTTTGTAGATAGTGCTATTAAACCTGTTGATTCCAATTCAAATAAATTTGTACAAGTTGAAATTCCGATAGGATCTGGGAATAAATTAATTGGTCAAATTTTAGAAAAAGCAGGAGTCATTAAGAGCGCCACAGTCTTTAATTACTATTCCAAGTTCAAAAACTATAGTAATTTTCAAAGTGGATACTACAATCTAAAAAAAAGTATGACTTTAGATCAGATTGCTGCTGAATTGGAAAAAGGCGGAACTGCAGAACCGACAAAACCAGCTTTAGGTAAGATATTAATTACCGAGGGTTACACTATTAAACAGATTGCTAAAGCTATTGAGTCTAATAAAATTGATACAAAGACTACAAGTACACCTTATAAAGCTGATGATTTCTTGAAACTTGTTCAAGATGAAACGTTTATTAAAAAAATGGTAGCTAAATATCCAAATTTACTAGGAAGTCTACCTGATAAATCAAAAGCTATTTATCAATTGGAAGGATATTTATTCCCAGCTACTTACAACTATTATAAAGATACAACCTTAGAAGGACTTGTTGAAGATATGATTTCAACAATGAATACTAAGATGGCACCTTACTATAACACTATTAAAGCGAAGAATATGTCTGTAAATGATGTTTTGACATTATCATCTCTTGTTGAAAAAGAGGGATCAACAGACGAAGATCGCCGTAAAATAGCAAGTGTCTTTTATAACCGATTATCAGCCGGTCAAGCTCTTCAAAGTAACATTGCAATTTTGTATGCTATGGGGAAATTAGGTGATAAAACAAGTTTAGCTGAAGATGCTCAAATTAATACTTCAATTAAATCACCATACAACATCTATACTAATACTGGTTTGATGCCTGGACCAGTTGATAGTCCAAGTATCTCAGCAATTGAAGCAACTATAAAACCTGCTTCAACAGATTACCTTTATTTTGTCGCTGATGTGAAGACCGGAAATGTATACTACGCTAAAGACTTTGAAACACACAAGGCTAACGTTGAAAAATATATCAATAGTCAAATTAAC

SEQ ID NO: 21310 - protein, 600 aa, Streptococcus agalactiae
MTEFNDDQHSNHDQKSFKEQILAELEEANRLRKLREEELYQKEQEAKEAARRTAQLMADYEAQRLKDEQEARAKALETKQRLEEQEKARIEAKLQAEAAREEERRQAEQALASQEEQVINQGMEPSRELDSGSKSSEFRTTENVPEIDLKADKTDVATAVPNQETEEIFLVRATDIPTEGENVKLGETSELEPIAKEPIRVEDLPKEEEGIALSAKKKHNKRERRQKADNVAKRIARILISIIILVLLLTAFVGYRFVDSAIKPVDSNSNKFVQVEIPIGSGNKLIGQILEKAGVIKSATVFNYYSKFKNYSNFQSGYYNLKKSMTLDQIAAELEKGGTAEPTKPALGKILITEGYTIKQIAKAIESNKIDTKTTSTPYKADDFLKLVQDETFIKKMVAKYPNLLGSLPDKSKAIYQLEGYLFPATYNYYKDTTLEGLVEDMISTMNTKMAPYYNTIKAKNMSVNDVLTLSSLVEKEGSTDEDRRKIASVFYNRLSAGQALQSNIAILYAMGKLGDKTSLAEDAQINTSIKSPYNIYTNTGLMPGPVDSPSISAIEATIKPASTDYLYFVADVKTGNVYYAKDFETHKANVEKYINSQIN

SEQ ID NO: 21311 - protein, 501 aa, Streptococcus agalactiae
ATGATTATTAGAAATGGTTGCCTAGAGGATTTACAGCAAGTCATTAGTATTGAACGAATAAATTTTTCAGAAGCAGAGGCTGCGAGTAAAAAAGCAATGCAAGAACGTCTAACGATAATGACTGATACTTTTTTAGTTGCAGAGATTAATGGTCGTTTAGCAGGTTACATTGAAGGACCGGTTATTAAAGGTCGGTACTTAACGGACGATTTATTCCATAAAGTTTCTGAATTCCCTGTAAGGGTAGGTGGTTTCATAGGAATTACTAGTCTATCAATACATCCTGATTTTAAAGGTCAGGGGATTGGTACAGCATTATTAGCAGCGATGAAAGACCTGGTTGTTTCTCAAGAACGAGATGGTATAAGTTTAACTTGCCATGATGATTTAATTTCCTTCTATGAAATGAATGGATTTAAAGATGAGGGAGAATCTGACTCCCAACATGGTGGTTCGCTTTGGTATAATATGATCTGGAATAATCCAACACGATCAATTTGT

SEQ ID NO: 21312 - protein, 167 aa, Streptococcus agalactiae
MIIRNGCLEDLQQVISIERINFSEAEAASKKAMQERLTIMTDTFLVAEINGRLAGYIEGPVIKGRYLTDDLFHKVSEFPVRVGGFIGITSLSIHPDFKGQGIGTALLAAMKDLVVSQERDGISLTCHDDLISFYEMNGFKDEGESDSQHGGSLWYNMIWNNPTRSIC

SEQ ID NO: 21313 - protein, 1329 aa, Streptococcus agalactiae
ATGTCAAAAACTTATCATTTTATTGGTATTAAAGGATCCGGAATGAGTGCCCTAGCACTGATGCTTCATCAAATGGGACATAACGTTCAAGGAAGTGACGTTGACAAATATTATTTTACTCAACGTGGTTTAGAGCAAGCAGGTATAACTATATTACCTTTCTCACCGAATAATATCAGTGAGGATTTAGAGATTATTGCAGGAAATGCTTTTCGTCCAGATAACAATGAAGAGTTGGCTTATGTTATTGAAAAGGGCTATCATTTTAAACGATATCATGAATTTCTCGGAGATTTTATGCGTCAGTTCACTAGTCTAGGTGTAGCTGGGGCACATGGAAAAACCTCAACGACAGGTTTATTAGCTCATGTTTTAAAAAATATTACAGACACTTCTTTCCTAATTGGAGATGGTACAGGACGTGGTTCTGCTAATGCTAATTACTTTGTGTTTGAAGCTGATGAATACGAACGTCATTTTATGCCGTACCATCCAGAATACTCAATTATTACCAATATTGATTTTGACCATCCTGATTATTTTACAGGCCTAGAGGACGTATTCAATGCTTTTAATGACTATGCTAAGCAAGTTCAAAAAGGTTTATTCATTTATGGAGAAGATCCAAAACTTCATGAAATCACTTCTGAGGCACCAATATATTATTATGGTTTTGAAGATTCAAATGATTTTATAGCAAAAGATATCACTCGAACTGTTAATGGTTCTGACTTTAAGGTTTTCTATAACCAAGAAGAAATTGGTCAGTTTCACGTACCAGCATACGGTAAACATAATATCTTAAATGCAACTGCTGTTATTGCTAACCTTTACATAATGGGAATTGATATGGCATTAGTAGCTGAGCATTTGAAGACATTTTCAGGGGTAAAACGTCGTTTTACTGAGAAAATTATTGACGATACTGTCATTATTGATGACTTTGCTCACCATCCTACTGAGATTATTGCGACATTAGATGCTGCTCGACAAAAATACCCGTCAAAAGAAATTGTAGCTATTTTCCAACCGCATACGTTCACTCGTACGATAGCTCTTTTAGACGAATTTGCCCATGCCTTGAGTCAAGCGGATAGCGTTTATCTCGCTCAAATATATGGTTCTGCTAGAGAAGTAGATAATGGTGAGGTGAAGGTAGAAGATTTAGCTGCTAAGATTGTCAAACACTCAGATTTAGTGACAGTCGAAAATGTCTCGCCTTTACTCAATCATGATAATGCTGTCTATGTCTTTATGGGTGCTGGAGACATTCAATTGTATGAGCGCTCTTTTGAAGAATTATTAGCTAACCTAACTAAAAATACACAA

SEQ ID NO: 21314 - protein, 443 aa, Streptococcus agalactiae
MSKTYHFIGIKGSGMSALALMLHQMGHNVQGSDVDKYYFTQRGLEQAGITILPFSPNNISEDLEIIAGNAFRPDNNEELAYVIEKGYHFKRYHEFLGDFMRQFTSLGVAGAHGKTSTTGLLAHVLKNITDTSFLIGDGTGRGSANANYFVFEADEYERHFMPYHPEYSIITNIDFDHPDYFTGLEDVFNAFNDYAKQVQKGLFIYGEDPKLHEITSEAPIYYYGFEDSNDFIAKDITRTVNGSDFKVFYNQEEIGQFHVPAYGKHNILNATAVIANLYIMGIDMALVAEHLKTFSGVKRRFTEKIIDDTVIIDDFAHHPTEIIATLDAARQKYPSKEIVAIFQPHTFTRTIALLDEFAHALSQADSVYLAQIYGSAREVDNGEVKVEDLAAKIVKHSDLVTVENVSPLLNHDNAVYVFMGAGDIQLYERSFEELLANLTKNTQ

SEQ ID NO: 21315 - protein, 615 aa, Streptococcus agalactiae
GTGAATAGAGGCTCTAGACGATTTCCGTTGATAGCAGATAATGAACCAGTAATGTCTCCGCTTGTAAAGATGAATCTTTATGATAATGAAGATTTAATTAACAACATTCGAGGCTTTTATCAAGAAAAAACATATCAAAGCATGGTCAAAAGCAATTATGAACATGAAGAAATATCACATCCTAAGGTAATTGAAAATGATCCTGTACCACCGCAGAGTTTTGTAAAAAAAGCGACAGAGTTGAGCAAATCTCGACAAGAGGCAAAGAGGTCTGTTCGGGAGAAACGACAAGCTTACTATGCGAAACAGGAATTTAAGGCGCCATCAAAGGAAGCTTTTCAGCAACAATTGAAGGCAACAGTACCGAAAAAACAAACTCAGCGAAAGGTGACTGAACTAAGTCATCTTTCTGATCGTTTACAGCAGGAAAGCTATATATTAGCAGAAATTCCAATCATATTTCAAGAACCTGATAATACACCGAACCCAAAAACAAAGAAAAATAATTTTGATTTTTTGAAACGCAGTCAAGTTTACAATAAACAAGACAATCAGTTTCACAAAGAAAGAGCCAAGGCTCAAGAATTAAATCTGACACGTTTTAAAGACATTAAT

SEQ ID NO: 21316 - protein, 205 aa, Streptococcus agalactiae
MNRGSRRFPLIADNEPVMSPLVKMNLYDNEDLINNIRGFYQEKTYQSMVKSNYEHEEISHPKVIENDPVPPQSFVKKATELSKSRQEAKRSVREKRQAYYAKQEFKAPSKEAFQQQLKATVPKKQTQRKVTELSHLSDRLQQESYILAEIPIIFQEPDNTPNPKTKKNNFDFLKRSQVYNKQDNQFHKERAKAQELNLTRFKDIN

SEQ ID NO: 21317 - protein, 96 aa, Streptococcus agalactiae; identical to SEQ ID NO: 7625

SEQ ID NO: 21318 - protein, 32 aa, Streptococcus agalactiae; identical to SEQ ID NO: 2986

SEQ ID NO: 21319 - protein, 111 aa, Streptococcus agalactiae
ATGATCTGGAAAATGGACCAAATTTCTAACAGTTTATTCTCAATAGGTGTCCCCGATAATGCAAAACAATTTTTGACCTCAAAAGATCTCAAGCTATGGGCTATTTTAGTT

SEQ ID NO: 21320 - protein, 37 aa, Streptococcus agalactiae
MIWKMDQISNSLFSIGVPDNAKQFLTSKDLKLWAILV

SEQ ID NO: 21321 - protein, 3096 aa, Streptococcus agalactiae
ATGAGTAGAATGATTCCAGGACGTATTCGAAATCAAGGTATAGAACTCTACGAACAAGGTTTGGTGTCCTTGATTTCTCAAGAAGGTAATCTATTAAAAGCTAAAGTTGGGGATTGTCAGATTGAATATTCATTAGTAACAGAAGAAACAAAATGTTCTTGTGATTTTTTTGCAAGAAAAGGCTATTGTCAACATTTAGCTGCTCTGGAGCATTTCTTGAAAAACGATCCAGAGGGTAAAGCAATCTTATCTAAAGTTCAAGTTCAACAAGAAAGTCAACAAGAAACTAAGAAGAAAACCTCTTTTGGTAGTGTTTTTTTAGATAGTCTAATTATTAATGAAGATGATACTATAAAATATCAACTATCGGCTCAAGGAGAACAAAATCCTTATGCTAATGATATCTGGTGGACTTTAAAAATTAGACGACTGCCTGATGATAGAAGTTATGTTATTCGTGACATCAAAGCCTTTTTAAATACTGTTCGAAAAGAAGCTTATTATCAGATTGGAAAACAATACTTTGAAACTTTGTCTTTGATACAGTTTGATGAGACCAGTCAAGAATTGATAGAATTTTTATGGAGGCTCATTCCAAGTCATTCAAGCAAAATTGATCTAGAGTTTATTTTACCAAATCAAGGTCGTCACCTTAGTCTCACTCGTGGTTTTTTTGAAGAGGGCGTTACTTTGATGAATGCTTTAGAAAATTTTTCATTTGAAAGTGATTTTCATCAATTTAATCACCTCTACTTTAAGGAATTAGAATGTGAGGATCATCTTTATCAATTTAAGGTTATTGTCCATAGGCAATCAATTGAATTAGAAATCAAAGAGAAAGACTTAAAACCACTATTTGCGAATTCTTATTTGTTTTATCGCGATACTTTCTACCATCTTAATTTGAAGCAAGAAAAGATGGTAACGGCTATTCGTAGTCTTCCCATTGAGGGAGATTTAGCAAAACATATCCATTTTGATTTAGATGATCAAGATAAGTTAGCAGCTCATTTACTGGATTTTAAGGAAATTGGACTAGTGGATGCTCCACGGAGCTTCTCTATTCATGATTTTAAGGTAAATTTTGAGTTCGATATTAATAGTCAAAATGAAATTTTATTGCAAATGGTATTTGATTATGGTAATGATTTAACTGTTCATAATCGTCAAGAACTAGAACAGTTAACATTTGCTAGTCACTTCAAACATGAAGAAAAAATATTTAAACTCTTAGAAAGATATGGCTTTGCACCCCACTTTTCAACCAGCCACCCAGCATACAGTGCACAAGAATTATACGATTTTTATACCTATATGCTTCCACAATTTAAAAAAATGGGAACAGTGAGCTTATCCGCAAAATTGGAAAGTTATCGTCTCATAGAACGACCGCAAATTGATATTGAAGCTAAGGGAAGCCTGCTAGATATTTCTTTTGATTTCTCTGATTTACTGGAAAACGATGTTGATCAAGCTCTGGTAGCCTTGTTTGACAATAATCCTTATTTTGTGAATAAATCAGGGCAATTAGTTATTTTTGATGAAGAGACTAAGAAAGTAAGTGCAACTTTGCAAGGGTTGAGAGCTAGACGAGCAAAGAATGGGCATATTGAATTAGATAATATTGCAGCATTTCAATTATCAGAACTGTTTGCAAATCAAGATAATGTTAGCTTTTCACAACATTTTTACCAATTGATTGAAGATTTGAGACACCCAGAAAAGTTTAAAATACCTAGTCTACCTGTTTCAGCTTCTTTGCGCGATTATCAGCTTACAGGTGTCCGTTGGTTAAGTATGTTAGATCATTATGGCTTTGCAGGGATTTTAGCTGATGATATGGGGCTTGGAAAAACACTTCAAACGATTTCATTTTTAAGTACAAAACTAACTAGAGATTCTCGTGTGCTTATTTTATCACCATCAAGTTTAATTTATAATTGGCAAGATGAATTCCACAAATTTGCGCCAGACGTAGATGTAGCAGTTGCCTATGGTTCTAAGATTCGTAGAGATGAAATTATTGCTGAACATCATCAAGTAATCATTACAAGTTATTCATCATTTAGGCAGGATTTTGAGACTTATTCTGAAGGAAATTATGATTATTTAATCTTGGATGAAGCACAGGTTATGAAAAATGCTCAAACTAAAATAGCCCATAGCTTGAGATCTTTTGAGGTCAAAAATTGTTTTGCATTATCGGGGACACCTATTGAGAATAAACTGTTAGAAATTTGGTCCATTTTCCAGATCATTTTACCTGGTTTATTACCTGGTAAGAAAGAGTTTTTGAAGTTGAACCCTAAACAAGTTGCTCGTTATATCAAACCATTTGTGATGAGACGTCGAAAAGAAGAAGTTCTCCCAGAATTACCGGATTTGATTGAAATGAACTATCCAAATGAAATGACAGACAGTCAAAAAGTTATCTATTTGGCGCAATTACGCCAAATTCAAGAAAGTATTCAACATTCTAGTGATGCTGACTTAAATCGTCGTAAAATTGAAATTTTATCTGGCATCACACGATTACGTCAAATTTGCGACACTCCACGTCTTTTTATGGATTATGATGGTGAAAGCGGTAAGTTAGAAAGCCTACGTCAACTTTTAACACAAATTAAGGAAAATGGACATCGTGCTCTGATTTTTTCTCAGTTCAGGGGTATGTTAGATATCGCAGAACGTGAGATGGTAGCTATGGGGCTTACAACTTATAAAATTACTGGTTCTACACCAGCAAATGAACGTCATGAAATGACCAGAGCGTTTAATGCAGGATCAAAAGATGCTTTCTTGATTTCTTTAAAAGCTGGTGGCGTTGGTCTCAACCTTACAGGAGCTGATACCGTTGTTCTGATTGACTTGTGGTGGAATCCAGCTGTTGAAATGCAGGCGATTAGTCGCGCACATAGGTTGGGGCAAAAAGAGAATGTCGAGGTTTATCGCTTGATTACTAGAGGCACAATCGAAGAAAAAATTCTAGAAATGCAAGAAACTAAAAAACATTTGGTTACAACAGTTCTGGATGGAAATGAAACCCATGCTAGCATGAGCGTAGATGATATTCGAGAGATACTTGGAGTTTCTAAA

SEQ ID NO: 21322 - protein, 1032 aa, Streptococcus agalactiae
MSRMIPGRIRNQGIELYEQGLVSLISQEGNLLKAKVGDCQIEYSLVTEETKCSCDFFARKGYCQHLAALEHFLKNDPEGKAILSKVQVQQESQQETKKKTSFGSVFLDSLIINEDDTIKYQLSAQGEQNPYANDIWWTLKIRRLPDDRSYVIRDIKAFLNTVRKEAYYQIGKQYFETLSLIQFDETSQELIEFLWRLIPSHSSKIDLEFILPNQGRHLSLTRGFFEEGVTLMNALENFSFESDFHQFNHLYFKELECEDHLYQFKVIVHRQSIELEIKEKDLKPLFANSYLFYRDTFYHLNLKQEKMVTAIRSLPIEGDLAKHIHFDLDDQDKLAAHLLDFKEIGLVDAPRSFSIHDFKVNFEFDINSQNEILLQMVFDYGNDLTVHNRQELEQLTFASHFKHEEKIFKLLERYGFAPHFSTSHPAYSAQELYDFYTYMLPQFKKMGTVSLSAKLESYRLIERPQIDIEAKGSLLDISFDFSDLLENDVDQALVALFDNNPYFVNKSGQLVIFDEETKKVSATLQGLRARRAKNGHIELDNIAAFQLSELFANQDNVSFSQHFYQLIEDLRHPEKFKIPSLPVSASLRDYQLTGVRWLSMLDHYGFAGILADDMGLGKTLQTISFLSTKLTRDSRVLILSPSSLIYNWQDEFHKFAPDVDVAVAYGSKIRRDEIIAEHHQVIITSYSSFRQDFETYSEGNYDYLILDEAQVMKNAQTKIAHSLRSFEVKNCFALSGTPIENKLLEIWSIFQIILPGLLPGKKEFLKLNPKQVARYIKPFVMRRRKEEVLPELPDLIEMNYPNEMTDSQKVIYLAQLRQIQESIQHSSDADLNRRKIEILSGITRLRQICDTPRLFMDYDGESGKLESLRQLLTQIKENGHRALIFSQFRGMLDIAEREMVAMGLTTYKITGSTPANERHEMTRAFNAGSKDAFLISLKAGGVGLNLTGADTVVLIDLWWNPAVEMQAISRAHRLGQKENVEVYRLITRGTIEEKILEMQETKKHLVTTVLDGNETHASMSVDDIREILGVSK

SEQ ID NO: 21323 - protein, 1308 aa, Streptococcus agalactiae
ATGGTATTACCTACAGTTGCTATTGTTGGTCGTCCGAATGTTGGAAAATCAACATTATTTAACAGAATTGCAGGAGAACGTATTTCCATTGTTGAGGACGTTGAAGGAGTCACTCGTGATCGTATCTATACAACGGGTGAGTGGCTAAATCGTAAGTTTTCATTAATTGATACTGGTGGGATTGATGATGTTGATGCACCGTTTATGGAGCAAATTAAGCACCAAGCAGACATTGCTATGACAGAGGCTGATGTTATTGTGTTTGTTGTGTCGGGTAAAGAAGGTGTGACTGATGCAGATGAGTATGTCTCACGTATTCTTTATAAGACCAATAAACCGGTTATTTTAGCTGTTAATAAGGTAGATAATCCTGAGATGCGCAATGATATTTACGATTTCTACTCTCTTGGTTTAGGGGATCCTTATCCCTTGTCATCAGTTCATGGTATTGGTACTGGTGATATATTGGATGCTATTGTGGAAAATCTTCCGGTAGAAGAGGAAAATGAAAATCCAGATATTATTCGTTTTAGTTTGATTGGACGTCCAAATGTTGGGAAATCTAGTTTAATTAATGCCATCCTCGGGGAAGACCGTGTTATTGCTAGCCCAGTTGCTGGTACTACGCGCGATGCTATTGATACTAATTTCGTTGATAGCCAGGGGCAAGAGTATACTATGATTGATACTGCTGGTATGCGTAAATCTGGTAAGGTATATGAAAACACAGAGAAATATTCTGTTATGCGTTCTATGCGCGCCATCGACCGCTCAGATGTTGTTCTTATGGTGATTAATGCAGAGGAAGGTATTCGTGAGTATGACAAGCGTATTGCAGGGTTTGCACATGAAGCTGGTAAAGGTATTATTATTGTAGTTAATAAATGGGATACTATCGAAAAAGACAATCATACTGTCAGTCAGTGGGAAGCTGATATACGAGATAACTTCCAATTCTTGTCTTATGCGCCAATTATCTTTGTTTCTGCAGAGACAAAACAACGTTTGCACAAGCTACCAGATATGATTAAACGTATTAGCGAAAGTCAAAACAAACGTATTCCGTCTGCTGTATTAAATGATGTGATTATGGATGCTATTGCTATTAATCCAACACCAACTGATAAAGGAAAACGTCTTAAGATTTTCTACGCAACTCAAGTTGCTGTTAAACCACCAACTTTCGTTGTTTTTGTTAACGAAGAAGAATTGATGCACTTTTCATATCTTCGTTTCTTAGAAAATCAAATCCGTGAAGCATTTGTTTTTGAAGGAACACCAATTAATCTAATAGCACGTAAACGTAAA

SEQ ID NO: 21324 - protein, 436 aa, Streptococcus agalactiae; identical to SEQ ID NO: 7630

SEQ ID NO: 21325 - protein, 900 aa, Streptococcus agalactiae
ATGAAATCAGTGGGACAAGCATTAGAAAATCAAGGGAGAGTGCCTCGTAATACAAATGATGAGCTTATTCAAATGATTTTAGCAGATGCTCAGGTAGCGGAGTTCATTAAAACCCACCAACTTTCTCAGCGTGAAATAAATATCAGCATGTCTAAATTTAATCAATTTTTGATTGAGCGTCAGAAATTTAAAAATAAGGATAGTCAATATATCGCTAAAGGCTATGAGCCTATTTTGGTTATGAATGAAGGTTATGCAGATGTTTCTTATTTAGAAACACGAGAGTTAATTGAAGCACAAAAAAAACAAGCTATCAGTGATCGTATTAATTTAGTTAATCTACCCAAGTCCTATCGGAATATCAGAATGACTGACTTTGATATTAATAACGAGAGTCGAATGAAAGCTATGTCACAACTGCTTGATTTTGTAGAGACTTATCCTTCATATAATCATAAGGGGCTTTATTTATATGGAGATATGGGGGTTGGGAAATCCTATTTAATGGCAGCAATGGCGAGGGAATTATCAGAGAGAAAGGGTGTGTCAACGACTCTTCTTCATTTCCCTAGTTTTGCTATTGATGTCAAAAATGCTATTTCAAGCGGAACTGTAAAAGATGAAATTGATGCTGTGAAAAGTGTTCCAATTTTGATTTTAGATGATATTGGGGCTGAACAGGCAACGTCTTGGGTTCGTGACGAGATTTTACAAGTTATATTACAACATCGTATGCTAGAAGAGTTGCCCACTTTCTTTACGTCAAATTATAGTTTTAACGATTTGGAAAGAAAATGGGCTAATATAAAAGGAAGCGACGAAACTTGGCAAGCAAAACGAGTTATGGAGCGCGTACGATATTTAGCGATAGAATTCCACTTAGAAGGACCGAATCGCCGT

SEQ ID NO: 21326 - protein, 300 aa, Streptococcus agalactiae; identical to SEQ ID NO: 11866

SEQ ID NO: 21327 - protein, 1173 aa, Streptococcus agalactiae
ATGAGTCCAATAGATGAGTTTACATATATTAAGCAAAATAAGATTGTTTATGATAGTAATAGTTTAATACAATTGTATTTCCCAATTATGGGAAGTGATGCCATGGCACTCTATGATTATTTTGTTCATTTTTTTGATGACGGAATACGACGTCATAAATTTTCAGAGGTTCTCAATCATCTGCAATACGGGATGCCAAGATTTCAAGATGCATTGGTAATGTTAACAGCTTTGGATTTGTTGACTGTTTACCAAGCTACAGGTACTTACCTTGTTAAGTTGAATCAAGCTATGTCAAATGAGTTATTTTTATCTAATCCCATCTATCGTCGTTTGTTAGAAAAACGTATAGGAGAGGTAGCGGTGGCAGAATTAGATATGAAAATACCTAAAAATGCTAGAGATATCTCTAAAAAATTTACAGATGTTTTCTCGGATTTAGGACAACCAAAACAAGAGGTAAACCGGAGTAAAAATGTTTTTGACTTGGAAAGTTTCAAACGTTTGATGATGCGAGATGGCTTACGTTTTAACAATGAAAAAGATGATGTCTTAGGTATTTATAGTGTATCAGAACTTTATCATTTAAATTGGTATGATACCTATCAATTAGCAAAACAAACAGCTATTAATGGAATGATTGCGCCTCAGCGAATGAAAGTTCAACAAAATGAGGGGCAGCATATTAAAGATAATCAGAGTTTTACAAATAACGAAAAGGTCATACTAAGGGAATCTAAAAATGATAGTGCTCTAGTGTTCCTTGAAAAAATCAAGAGAAGCCGTAAGGCAGTGACAACAAGTGGTGAGAAGACTTTACTTGAGGATTTGGCAAAAATGAATTTCCTAGACGAAGTCATTAATGTTATGGTTTTATATACCTTGAATAAGACAAAATCTGCTAACTTAAATAAGGCCTATATCATGAAAGTTGCTAATGATTTTGCCTTTCAGAATGTTATGACGGCCGAAGATGCTGTGCTTAAAATTCGTGATTTTTCAGATCAAAAAGTAAGGACTAAAACAGAAACGAAGAAGAAACAATCGAATGTTCCTGAATGGAGTAATCCTGATTATAAAGATGAGGTTAGCCCAGAAAAAGAAATTGAATTAGAACAGTTTAAAACAGATGCCCTCAAGCGTTTAGAACGATTAGGAAAGGATGGTGAATCA

SEQ ID NO: 21328 - protein, 391 aa, Streptococcus agalactiae; identical to SEQ ID NO: 2994

SEQ ID NO: 21329 - protein, 475 aa, Streptococcus agalactiae
ATGCGTGTCCAAAATGTGGCTATAATAAATCTAGTGTGGTTGATAGCGACAAGCTGAAGAAGGTACGACTATTAGACGCCGGAGAGAGTGCGAAAAATGTGGCAACCGCTTTACAACATTTGAACGTTTGGAAGAATTGCCTCTTTTAGTCATAAAGAAAGATGGTACTCGCGAGCAATTTTCTCGAGATAAAATTTTGAATGGTATTATTCAGAGTGCTCAAAAACGCCCTGTTTCGAGCGAAGATATTGAAAATTGTATCTTACGTATCGAACGTAAAATTAGGAGTGAGTATGAAGATGAGGTTTCTAGTATCACTATCGGAAATTTAGTGATGGATGAACTCGCCGAATTAGATGAGATTACTTATGTGCGCTTTGCTAGTGTTTATAAATCTTTTAAAGATGTAGACGAAATTGAAGAACTACTTCAACAAATTACAAAGCGCGTACGGAGTAAAAAGAGTGGTAGCGTG

SEQ ID NO: 21330 - protein, 159 aa, Streptococcus agalactiae
  VARIANT 17: Xaa = Any Amino Acid
MRCPKCGYNKSSVVDSXQAEEGTTIRRRRECEKCGNRFTTFERLEELPLLVIKKDGTREQFSRDKILNGIIQSAQKRPVSSEDIENCILRIERKIRSEYEDEVSSITIGNLVMDELAELDEITYVRFASVYKSFKDVDEIEELLQQITKRVRSKKSGSV

SEQ ID NO: 21331 - protein, 1499 aa, Streptococcus agalactiae
GTGAAAAATAAAAAAGATCAGTTTATAGGGGTAAAACAACCTCTGTCAAAAAAATTATCGCAATTAGTTTTTATCTTATTTTTTAGCCTATTTACAGTATTTTCTGTTTTAGTTTATACTTCGGCAACAAGATACGTCCTTCACAGGGAAAAAATTAATGTCGGTAGGTCATTAGAAAAAACTAGAGTTCGTTTGTCGCAAGCGAACTCTAGTTTGACATCCGATGATATTTTAGAGATCCTGTACAACCAGGTTTTTGCGGATGACATCTATCCTCATAAGCGTCAAAATGGAATTGTTAGAACGGGCGAGTCAATTGATAGTATTCTTTATGTTAATCAAGAAATGACCCTATACGATGTCAACAGGAAACCAGTTTTTTCTACACTGAGAACGGGTATGCCGACTATTGGTAATCCATGGGAAAAGTATCATTTCTAAGTTGCAGATATGGAAGGTTTTGTTGGTACAAAAGCAATCTACTCCCAAAAAACAGGACAGTTGCTTGGATACGTTCAAATTTTCTATAATTTAGGCCGTTATTATAGTATGAGGCAAAACATAATCGTTTTCTGATTATGATGGAAGTTTTAGGGACTGTTTTAGCCTTGGTCGTTATTAATAGTGCTACTAAGCGTATTGTTCGTCCGGTTAAAAATTTACACGACTTAATGCATCAGATATCTGAAAATCCTAGTAATTTAGAAATTAGAAGTAAGGTCCGTTCAGAAGACGAAATTGGAGAATTGTCTAGGATTTTTGATGGGATGTTGGATCAGTTGGAAGACTATACTCGTCGACAATCACAATTCATTAGTGATGTTAGTCATGAATTAAGAACGCCTGTCGCTGTTGTAAAGGGTCATATTGGTTTATTACAACGTTGGGGGAAAGATGATCCAGAAATTCTTGAAGAAAGTTTAGCAGCGGCATACCATGAGGCAGATCGTATGTCCTTAATGATTAATGACATGTTAAATATGATTCGCGTCCAAGGAAGCTTGGAACTTCATCAAGATGAAGTGACAGATTTATCAAGCTCTATATCAGTTGTTATTGAAAATTTCCGTATTTTGAGAGAAGATTTTCAATTTATTTTTGAAAATAATATTTCAGATATCGTTTGGGGAAAGATATATAAGATACATTTTGAGCAAGCTCTCATGATCTTAATTGATAACGCTATCAAGTACTCTCCTAGTTATAAAGAAGTCAGTGTTGTTTTATCAGTAGACAATGATTTTGCGACAGTAGTTGTAAAAGATAAAGGAGAAGGTATCTCAGATGAAGATATTGAGTTTATCTTTGATCGTTTTTATCGAACTGATAAATCACGTAACAGAGAAAGTACACAAGCTGGTTTAGGTATCGGGCTTTCAGTGTTTAAACAAATTATGGATGCTTACCATTTAAAGGTGGATATTAAAAGTGAACTAAATCAAGGGACTGAATTCATTGTTCGCATTCCTATAAAAAAATTTGAAGAAACTAAAGAAATA

SEQ ID NO: 21332 - protein, 501 aa, Streptococcus agalactiae; identical to SEQ ID NO: 7638

SEQ ID NO: 21333 - protein, 687 aa, Streptococcus agalactiae
ATGGGTAAAAAGATCTTAATAATCGAAGATGAGAAAAATTTAGCTCGCTTCGTCTCGTTAGAACTACTACATGAAGGATATGATGTTGTTGTTGAAACAAACGGTCGTGAAGGATTGGACACAGCATTAGAAAAAGATTTTGATTTGATTCTACTGGATTTAATGCTTCCAGAGATGGATGGTTTCGAAATCACACGTCGCCTGCAGGCTGAAAAAACAACCTATATCATGATGATGACAGCACGTGATTCTGTTATGGATATTGTAGCTGGTCTTGATCGTGGAGCAGATGATTATATTGTTAAGCCGTTTGCAATCGAAGAATTATTAGCACGTGTTAGGGCGATTTTCCGACGCCAAGAAATTGAAACGAAGACAAAAGAAAAAGGTGATAGCGGTAGTTTCCGTGATTTATCATTAAATACTCATAATCGTTCAGCGATGCGTGGTGATGAGGAAATTTCACTAACAAAACGTGAATTTGATTTATTGAATGTCTTGATGACAAATATGAATCGTGTTATGACACGAGAAGAGTTGCTAGAACATGTTTGGAAATACGATGTGGCAGCAGAGACAAACGTTGTTGATGTTTATATCCGTTACCTAAGAGGTAAAATTGATATCCCAGGTCGTGAATCATATATTCAAACTGTTCGCGGAATGGGCTATGTGATTCGTGAAAAA

SEQ ID NO: 21334 - protein, 229 aa, Streptococcus agalactiae; identical to SEQ ID NO: 3000

SEQ ID NO: 21335 - protein, 456 aa, Streptococcus agalactiae
ATGGAGCGTCATTCAGAGATAATGGATATTTCTGATATTCAAGTTTCAGGTCATGTGGTGTATGAAGATGGTCTCTATCTACTTGACTATAATATGGCTTACGATATTACATTACCGTCTAGTCGTTCTATGAAACCAGTTGTTTTATCTGAAAAGCAAACTATTAATGAAGTTTTTATTGAAGCTGAAAACGTTAGCACTAAAAAAGAGCTCGTTGATCAGGATTTGGTCTTAATATTAGAGGAAGATGATATTAATTTAGAAGAAAGCGTTATCGATAATATCTTGTTAAATATACCTCTTCGTGTTCTGGCAGCTGATGAGGTTGGGGTAGAAGCGGATTTATCAGGTAAAAATTGGTCGTTAATGACTGAAAAGCAGTATGAAGAAAAACAAGCTAAAGAAAAAGAAAAATCTAATCCTTTCGCAGCCTTAGAAGGTATGTTTGATAGTGAT

SEQ ID NO: 21336 - protein, 152 aa, Streptococcus agalactiae; identical to SEQ ID NO: 7642

SEQ ID NO: 21337 - protein, 888 aa, Streptococcus agalactiae
TTGCTGTATCAACAAATTGCAAGTAATAAGAGAAAAACGGTTGTCTTGTTAATTGTCTTCTTCGGTCTTTTAGCAGCTATTGGAGCAGCTGTAGGTTATTTGGTATTAGGCAGCTACCAATTTGGGCTTGTTCTAGCTCTAATTATTGGGGTTATCTATGCAGTAAGTATGATTTTTCAATCAACTAATGTTGTTATGTCAATGAACAATGCGCGTGAAGTTACAGAAGATGAGGCGCCAAATTATTTTCATATTGTTGAAGATATGGCAATGGTAGCTCAGATACCTATGCCACGCGTTTTCATTGTTGAAGATGACTCCCTAAATGCCTTTGCCACAGGCTCTAAGCCAGAAAATGCTGCTGTTGCAGCAACAACGGGCCTATTAGCTGTTATGAACCGCGAAGAGCTAGAGGGTGTTATTGGACATGAGGTTAGTCATATTCGTAATTATGATATCCGTATTTCAACCATTGCAGTAGCTTTAGCGAGTGCTGTAACTCTAATATCAAGCATTGGTAGCCGTATGTTATTTTACGGCGGAGGTCGTAGGCGTGATGATGACAGAGAAGATGGTGGAAACATCTTGGTTTTGATTTTCTCTATTTTATCACTAATCCTTGCACCATTAGCTGCTAGTTTAGTTCAATTAGCTATTTCAAGACAGCGCGAATACTTAGCAGACGCTAGTTCTGTTGAGTTAACAAGAAATCCACAAGGGATGATCTCTGCTTTAGAAAAACTTGATCGTTCTGAACCTATGGGGCATCCAGTAGATGATGCTAGTGCGGCTCTCTATATCAATGACCCAACGAGAAAAGAAGGGTTAAAGTCTTTATTTTATACGCATCCACCAATTGCAGATCGTATTGAGCGTTTGCGTCATATG

SEQ ID NO: 21338 - protein, 296 aa, Streptococcus agalactiae
MLYQQIASNKRKTVVLLIVFFGLLAAIGAAVGYLVLGSYQFGLVLALIIGVIYAVSMIFQSTNVVMSMNNAREVTEDEAPNYFHIVEDMAMVAQIPMPRVFIVEDDSLNAFATGSKPENAAVAATTGLLAVMNREELEGVIGHEVSHIRNYDIRISTIAVALASAVTLISSIGSRMLFYGGGRRRDDDREDGGNILVLIFSILSLILAPLAASLVQLAISRQREYLADASSVELTRNPQGMISALEKLDRSEPMGHPVDDASAALYINDPTRKEGLKSLFYTHPPIADRIERLRHM

SEQ ID NO: 21339 - protein, 552 aa, Streptococcus agalactiae; identical to SEQ ID NO: 11879

SEQ ID NO: 21340 - protein, 184 aa, Streptococcus agalactiae; identical to SEQ ID NO: 3006

SEQ ID NO: 21341 - protein, 723 aa, Streptococcus agalactiae
TTGAGGCTTACTATGACACCCCAAGCATTTTATCAAGTTCTGATAGAGCATGGTATTACACTTACTGACAAACAGAAAAAACAATTTGAAACTTATTTTAGACTTCTTGTTGAATGGAATGAGAAAATTAACCTAACAGCTATTACAGATAAAGAAGAGGTTTACTTAAAGCACTTCTATGATTCTATTGCGCCGATTTTACAAGGTTATATTGACAATAGTCCTCTTAGCATTTTAGATATTGGTGCTGGTGCAGGTTTTCCTAGTATTCCTATGAAAATCCTTTATCCTGAAATTGATATTACTATTATTGATTCACTTAATAAACGCATTAATTTTCTAAACATATTAGCTAATAAACTTGAACTTTCAGGAGTTCACTTCTTCCATGGGCGCGCTGAGGACTTTGGTCAAGATAAAGTATTTCGAGCTAAATTTGATATCGTAACAGCTCGTGCAGTAGCTAGAATGCAGGTTCTAGCAGAATTGACAATACCTTTTCTTAAAGTTAATGGTCGCTTGATTGCACTGAAAGCTGCAGCTGCTGAAGAGGAATTAATTTCTGCTGAAAAAGCTTTGAAAACACTATTTTCACAAGTAACTGTAAATAAAAATTATAAGTTACCTAATGGTGATGACCGAAATATCACAATCGTTAGCAAGAAAAAAGAAACGCCTAATAAATACCCTCGTAAAGCTGGTACTCCAAACAAGAAGCCTTTA

SEQ ID NO: 21342 - protein, 241 aa, Streptococcus agalactiae
MRLTMTPQAFYQVLIEHGITLTDKQKKQFETYFRLLVEWNEKINLTAITDKEEVYLKHFYDSIAPILQGYIDNSPLSILDIGAGAGFPSIPMKILYPEIDITIIDSLNKRINFLNILANKLELSGVHFFHGRAEDFGQDKVFRAKFDIVTARAVARMQVLAELTIPFLKVNGRLIALKAAAAEEELISAEKALKTLFSQVTVNKNYKLPNGDDRNITIVSKKKETPNKYPRKAGTPNKKPL

SEQ ID NO: 21343 - protein, 1377 aa, Streptococcus agalactiae
ATGAAACATTTCTTTGATTACAAGACAATGTCTGTCGCACGTAAACTCAGCATTAGTTTTATCGCTGTTATCCTATTGGGAAGTATTTTACTTTCACTTCCAATTTTTCAATATGCTAACGCCCCTAAAACACATTACATTGATCACCTTTTCACGACTGTTTCAATGGTATGTGTAACTGGTTTATCTGTTTTTCCTATCAGTAAGGTTTATAACGGTTGGGGGCAGATTGTAGCTATTTTACTCATGCAAACAGGGGGACTTGGTTTAGTAACACTAATGTCATTGTCTTACTATACTCTAAGACGTAAAATGTCGTTAAATGATCAGACCCTTTTGCAGTCGGCGATAACTTATAACAGTTCGACAGATTTAAAAAAATATCTCTATATGATTTTTAAAGTAACTTTAACTTTAGAAGTTTTAGCAGCCAGCATTTTAGCCATAGATTTTATTCCTCGATTTGGTTTGGGTCATGGTATCTTTAATAGTATATTCTTAGCTGTCTCAGCCTTTTGTAATGCCGGTTTTGATAATCTAGGGGCAACGAGCTTAGCTCAATTTAAACTAAATCCTTTGGTTAACATTATCGTTTGTTTCTTGATTATTTCAGGAGGACTTGGATTTGCCGTATGGAAAGATTTAATTGAAGCTACTATACAAACATCTCACAAGGGACCAAAATTAATCAAGACATTTCCAAAACGCCTCAGCAACCATTCTAAACTGGTTTTAAAAACAACAACCATTATTTTACTAACAGGAACTTTGCTTTCTTGGTTATTAGAGTTTGGAAATTTTAGAACAATTGCTAATTTATCTCTACCTAAACAACTAATGGTCAGCTTTTTCCAAACAGTTACGATGCGTACCGCTGGATTTTCAACTATTGATTATACCCAAACTGATTTCGCAACCAACCTTGTTTATATTATCCAAATGTTAATTGGAGGAGCTCCTGGTGGAACGGCAGGAGGATTTAAAGTCACTGTTATCGCCATTTTACTCTTACTATTTAAAGCCGAACTGAGTGGCCAAAGCCAAGTGACTTTTCATTATCGAACAATTCCTTCCAGTATTATTAAACAAACACTATCGATTTTAACTTTCTTTTTTATCATACTTATTAGCGGCTATCTCCTTCTTCTGGAACTCAATCCCCATATAGATCCTTTTTCTCTTTTCTTTGAGGCATCTAGTGCCTTAGCAACCGTGGGTGTAACAATGAACACTACCAATCAATTAACTCTGGGCGGTCGAATTGTAATTATGTTCCTCATGTTTATTGGTCGAGTCGGTCCAATTACCGTACTGCTATCAATTCTTCAGAAAAAAGAGAAGGAAATTCACTATGCTGAAACAGAAATTATTCTAGGT

SEQ ID NO: 21344 - protein, 459 aa, Streptococcus agalactiae; identical to SEQ ID NO: 11884

SEQ ID NO: 21345 - protein, 669 aa, Streptococcus agalactiae
ATGAAAACAAAAATTATTGGTGTACTTGGTCTAGGAATATTTGGACAAACACTCGCACAAGAACTAAGTAACTTTGAACAAGATGTTATTGCTATTGACAGCAATCCTGAAAATGTACAAGCTGTCGCCGAAGTTGTTACAAAAGCAGCTATCGGAGACATTACTGATTTAGCTTTCCTAAAACACATCGGGATCAGTGACTGTGATACTGTTATTATTGCTACAGGAAACAGTTTAGAGAGCTCAGTATTGGCCGTAATGCACTGTAAAAAGTTAGGCGTTCCACAAGTTATTGCTAAAGCTCGAAACCTTGTATACGAAGAAGTACTCTATGAAATTGGTGCTGATTTGGTTATCTCTCCGGAGCGAGAATCTGGGCAAAATGTTGCTGCAAACCTCATGAGAAATAAAATTACAGATGTCTTCCAGATTGAATCTGATATTTCTGTCATTGAATTTAAAATTCCCAAATCATGGGTAGGGAAAACTGTCGAACAATTAAATATCCGTCACAAGTTTGATCTTAACCTCATAGGTATCAGAAAAGCAAAAAACAAACCTGTCGATACCGAAGTTCCAATCAATAGTCCACTTGAAGAAGGTATTATTCTAGTGGCTATCGCTAACTCAGATGCCTTCCAACGCTATGACTATTTAGGATACTTTAAC

SEQ ID NO: 21346 - protein, 223 aa, Streptococcus agalactiae; identical to SEQ ID NO: 7654

SEQ ID NO: 21347 - protein, 828 aa, Streptococcus agalactiae; identical to SEQ ID NO: 11887

SEQ ID NO: 21348 - protein, 276 aa, Streptococcus agalactiae; identical to SEQ ID NO: 11888

SEQ ID NO: 21349 - protein, 777 aa, Streptococcus agalactiae
TTGTCGGTGTCATATGATTTAGAGAATAATACTTTAGATGATGTTTCGTTTGATTTATATAAAGGTCAGCGGTTAGCTATCGTTGGGAAAAATGGTGCAGGTAAATCTGCTTTAGCTAAAGCGTTATGTCAATTTATCCCTAATAATGCTACTCTAATTTATAATAATGAAGATGTCAGTCAAGACTCTATAAAAGAAAGAGCAGAACGAATTGGCTATGTTTTGCAAAATCCCAATCAGATGATAAGTCAAGCGATGGTTTTTGATGAAGTTGCTCCGGGTCTCCGTTTAAGAGGTTTTAGTGATAATGATATAGAAAGTCGTGTCTACGATATATTAAAGGTTTGTGGGCTCTACCAATTTAGGAATTGGCCTATATCGGCTCTATCATTCGGTCAGAAAAAACGTGTTACGATTGCTTCGATACTGATTTTAAATCCAGAAGTTATTATTTTGGATGAACCAACAGCTGGTCAAGATATGAAGCATTATACTGAAATGATGTCTTTCCTTGATAAACTAAGTTGTGATGGACATACCATTGTTATGATTACACATGATATGCAGCTTATGTTAGAGTATACAGATCGTGCAATTGTAATCGACAATGGTCTGATTGTTGCAGATGATCATCCTATTAACATCCTTTCAAATACAGAGCTTTTGAAAAAGACTCATTTAAAGAAAACGAGTTTATTTGCTTTAGCAGACAGATTAGGGATATCTCCACAGAAACTAACACAATGGTACATTGATAATCAAGGAGGCAAGAATGGC

SEQ ID NO: 21350 - protein, 259 aa, Streptococcus agalactiae
MSVSYDLENNTLDDVSFDLYKGQRLAIVGKNGAGKSALAKALCQFIPNNATLIYNNEDVSQDSIKERAERIGYVLQNPNQMISQAMVFDEVAPGLRLRGFSDNDIESRVYDILKVCGLYQFRNWPISALSFGQKKRVTIASILILNPEVIILDEPTAGQDMKHYTEMMSFLDKLSCDGHTIVMITHDMQLMLEYTDRAIVIDNGLIVADDHPINILSNTELLKKTHLKKTSLFALADRLGISPQKLTQWYIDNQGGKNG

SEQ ID NO: 21351 - protein, 845 aa, Streptococcus agalactiae
ATGAAAGATTTTATTGAATGGAAGGATTTTACCTTTCAATATGACGTTCAATCTGAACCAACTTTAAAAGGGATTAACTTAAGCATTCCTAAAGGTAAAAAGGTCTTGATATTAGGACCTTCAGGGTCGGGGAAGTCAACGCTTGGTCATTGTTTAATGGTATTATCCCAAATACTCATAAAGGCCAATATAGTGGTATTTTTACGATTAACCATAAAAATGCTTTTGACTTGTCAATATATGACAAGTCTCATTTAGTTTCTACGGTTTTACAAGATCCAGATGGCCAATTTATAGGATTGACAGTAGCAGAAGATATTGCTTTTGCATTAGAAAATGATGTTGTAGCACAGGAAGAAATGGCCTCTATCGTTGAAATGTGGGCAAAACGTTTAGAAATAGCTCCTCTTTTGTCTAAACGTCCACAAGACTTGTCGGGAGGACAAAAACAACGGGTTAGTTTAGCTGGAGTTTTAGTAGACGATAGCCCAATTCTATTATTTGATGAGCCTTTGGCTAATCTAGATCCACAATCGGGACAAGATATCATGGCATTGGTTGACCGTATTCATCAAGAGCAAGATGCGACCACTATTATTATTGAACATCGATTGGAAGATGTTCTTTATGAGCGAGTAGATCGTGTAGTTCTTTTTAGTGATGGACAAATTATTTATAATGGGGAGCCGGATCAACTTTTAAAAACTAATTTTTTATCTGAATATGGTATTCGAGAACCACTGTATATTTCTGCTCTCAAAAATTTAGGATATGACTTTGAAAAACAAAATACAATGACGTCTATTGATGACTTTGATTTCAGTGAACTATTGATACCTAAAATG

SEQ ID NO: 21352 - protein, 282 aa, Streptococcus agalactiae
  VARIANT 53: Xaa = Any Amino Acid
MKDFIEWKDFTFQYDVQSEPTLKGINLSIPKGKKVLILGPSGSGKSTLGHCLXGIIPNTHKGQYSGIFTINHKNAFDLSIYDKSHLVSTVLQDPDGQFIGLTVAEDIAFALENDVVAQEEMASIVEMWAKRLEIAPLLSKRPQDLSGGQKQRVSLAGVLVDDSPILLFDEPLANLDPQSGQDIMALVDRIHQEQDATTIIIEHRLEDVLYERVDRVVLFSDGQIIYNGEPDQLLKTNFLSEYGIREPLYISALKNLGYDFEKQNTMTSIDDFDFSELLIPKM

SEQ ID NO: 21353 - protein, 237 aa, Streptococcus agalactiae
ATGACTAAGAAGGATTTGCTTCTATTTAATGTAGTTCAAGTTATTGCTAACCTTATAGGTTGGTCTGTCGTTGCACCGTATGGTGATATTTTCTTTTATAGCGAACCTGCAAGCAAAGTTTTTGCACAAGGTTTCTTATCAAGCCTTGTGAATTCCATTACTATTGGAGTAGGTGGTACGCTTTTGTTGCTAGCATACGCTAAATCACGACCACAAAAAGGTAGTTTATCCAAAGAT

SEQ ID NO: 21354 - protein, 79 aa, Streptococcus agalactiae
MTKKDLLLFNVVQVIANLIGWSVVAPYGDIFFYSEPASKVFAQGFLSSLVNSITIGVGGTLLLLAYAKSRPQKGSLSKD

SEQ ID NO: 21355 - protein, 376 aa, Streptococcus agalactiae
TTGTCAATAAGGTTTCAAATCAGCTTGAAATATGATAAAATAAAACAGATTGTAAGTGACTGTTTAAGCTTGTTTTTCAGAGAGGTTTTTATGAATACAAACACAATAAAAAAGGTTGTAGCGACTGGAATTGGAGCTGCACTTTTTATCATTATAGGTATGCTAGTTAATATACCAACACCAATTCCAAATACTAATATTCAATTGCAGTATGCAGTTTTAGCATTATTTGCAGTTATTTATGGACCAGGAGTTGGTTTTTTTACTGGTTTTATCGGACACGCATTGAAAGATTCGATTCAATATGGTTCTCCGTGGTGGACTTGGGTTTTAGTTAGTGGTCTTTTAAGTTGATGATAGGCTTTTTTGCAAAAAT

SEQ ID NO: 21356 - protein, 126 aa, Streptococcus agalactiae
  VARIANT 117: Xaa = Any Amino Acid
MSIRFQISLKYDKIKQIVSDCLSLFFREVFMNTNTIKKVVATGIGAALFIIIGMLVNIPTPIPNTNIQLQYAVLALFAVIYGPGVGFFTGFIGHALKDSIQYGSPWWTWVLVSGLLXLMIGFFAKN

SEQ ID NO: 21357 - protein, 921 aa, Streptococcus agalactiae
GTGAACTATATTTTCCCTTTGACACTGATATTGAAAACGCCAGCAAAGACAGACTTATTACCTCCCAAGGGGATTTCAGAAGTCTTTCAATCTCTTTTGTTGAAAATTGTTGATAATCCCATTCATGCCATTACCGAGGCCAATTATATGAGTATTCTATTTTGGGCGGTTATTTTTGGTTTGGCGATGCGAAGCAGTAATCAGCGTACAAAAGATTTAATGCAAACTTTTGCTGATGCTACTTCACAAGTTGTCAAATGGATTATCAATTTGGCCCCAATTGGTATTATGGGGTTGGTTTTCACTAGCATTTCAGAAAACGGTATTGGTATACTAGGTGATTATGGTCTTTTAATATTAGTTTTGGTGGGTACGATGTTATTTGTAGCTCTTGTCGTTAACCCAATCATTGCTTTTGTTATGATGCGTAAAAATCCTTACCCTTTGGTATTACGATGCTTAAAGGATTCAGGTATTACAGCTTTCTTTACACGTAGTTCTGCGGCGAATATTCCTGTTAATATGAGACTATGTGAGGATTTAGGATTAGATAAAGACACTTACTCAGTATCTATCCCGCTTGGTGCAGCTATCAATATGGCTGGTGCAGCTATTACAATTAATATCCTGACTTTAGCAGCAGTAAATACTTTAGGAATTACTGTTGATTTTCCAACAGCATTCTTATTAAGTGTGGTTGCTGCTGTATCAGCATGTGGAGCTTCTGGTGTAACTGGTGGTTCACTTTTATTGATTCCGGTGGCATGTAGCTTATTTGGTATTTCAAATGACGTTGCAATGCAAGTCGTAGGAGTTGGTTTCATTGTAGGGGTGATACAGGATTCGTGTGAGACAGCCTTAAATTCATCGACAGACGTTCTGTTCACGGCTGTAGCTGAAAAATCAGTTTTTGGAAAAAAA

SEQ ID NO: 21358 - protein, 307 aa, Streptococcus agalactiae
MNYIFPLTLILKTPAKTDLLPPKGISEVFQSLLLKIVDNPIHAITEANYMSILFWAVIFGLAMRSSNQRTKDLMQTFADATSQVVKWIINLAPIGIMGLVFTSISENGIGILGDYGLLILVLVGTMLFVALVVNPIIAFVMMRKNPYPLVLRCLKDSGITAFFTRSSAANIPVNMRLCEDLGLDKDTYSVSIPLGAAINMAGAAITINILTLAAVNTLGITVDFPTAFLLSVVAAVSACGASGVTGGSLLLIPVACSLFGISNDVAMQVVGVGFIVGVIQDSCETALNSSTDVLFTAVAEKSVFGKK

SEQ ID NO: 21359 - protein, 801 aa, Streptococcus agalactiae
GTGAAAGGAGTCACTCGTGATCGTATCTATACAACGGGTGAGTGGCTAAATCGTAAGTTTTCATTAATTGATACTGGTGGGATTGATGATGTTGATGCACCGTTTATGGAGCAAATTAAGCACCAAGCAGACATTGCTATGACAGAGGCTGATGTTATTGTGTTTGTTGTGTCGGGTAAAGAAGGTGTGACTGATGCAGATGAGTATGTCTCACGTATTCTTTATAAGACCAATAAACCGGTTATTTTAGCTGTTAATAAGGTAGATAATCCTGAGATGCGCAATGATATTTACGATTTCTACTCTCTTGGTTTAGGGGATCCTTATCCCTTGTCATCAGTTCATGGTATTGGTACTGGTGATATATTGGATGCTATTGTGGAAAATCTTCCGGTAGAAGAGGAAAATGAAAATCCAGATATTATTCGTTTTAGTTTGATTGGACGTCCAAATGTTGGGAAATCTAGTTTAATTAATGCCATCCTCGGGGAAGACCGTGTTATTGCTAGCCCAGTTGCTGGTACTACGCGCGATGCTATTGATACTAATTTCGTTGATAGCCAGGGGCAAGAGTATACTATGATTGATACTGCTGGTATGCGTAAATCTGGTAAGGTATATGAAAACACAGAGAAATATTCTGTTATGCGTTCTATGCGCGCCATCGACCGCTCAGATGTTGTTCTTATGGTGATTAATGCAGAGGAAGGTATTCGTGAGTATGACAAGCGTATTGCAGGGTTTGCACATGAAGCTGGTAAAGGTATTATTATTGTAGTTAATAAATGGGCNNNNNTTAAT

SEQ ID NO: 21360 - protein, 267 aa, Streptococcus agalactiae
  VARIANT 265, 266: Xaa = Any Amino Acid
MKGVTRDRIYTTGEWLNRKFSLIDTGGIDDVDAPFMEQIKHQADIAMTEADVIVFVVSGKEGVTDADEYVSRILYKTNKPVILAVNKVDNPEMRNDIYDFYSLGLGDPYPLSSVHGIGTGDILDAIVENLPVEEENENPDIIRFSLIGRPNVGKSSLINAILGEDRVIASPVAGTTRDAIDTNFVDSQGQEYTMIDTAGMRKSGKVYENTEKYSVMRSMRAIDRSDVVLMVINAEEGIREYDKRIAGFAHEAGKGIIIVVNKWAXXN

SEQ ID NO: 21361 - protein, 1328 aa, Streptococcus agalactiae
ATGCTTTTTGCGCTGTTCTTTGGAGCCGGTAATCTTATTTATCCAGCCTACTTAGGTATCTACTCTGGTTCTAATTGGGCGTGGGCTATCATTGGGTTCTGCTTAACAGGCGTAACTTTACCCCTACTTGGTGTTGCAGCTGTGGCGTACTCAGGAGCAACCGATGTTGAAAGCTTCACCAAACCTGTCTCTAAAACATATGCTATTTTCTTTGCAGTAGCACTATACCTATCTATTGGACCTTTCTTTGCCATTCCTCGAACAGGGGCAACCTCATTCTCAGTTGGTATTCAACCTATCTTAGGCGACAGCTCCTTAGTCAAAATTATCTATGGTTTAATTTTCTTTGGATTTCTTATTTCTTAGCTATTAGACCTAGTCAGATTGTAGATCGTATTGGTAAATATCTAACTCCCTTTTTACTAACTGTTATTAGTATTTTAATTATTGCCTCACTCATCCATCCAGCTGCTATCGTTGGAACACCACATAACGCTTCAACGAATGTCAGCGATGCTTTCAAGGATTTACCATTCCTAGCAGGACTGATTCAGGGGTATGGTACAATGGATGCCCTTGCATCAATTGCTTTTGCTATTATCGTTATTCAAGCAAGTAAACAGTACGGAGCAATTACCAAAAAAGAAATTACTTCTATGACACTTAAATCTGGTGCTATCGCTACATTTCTTTTAGCTTTTATTTATATTTTTGTAGGACGTATTGGTGCAACTTCACAAAGCTTGTTTAAATTTGCAAATGGTTCCTTCTTACTTCACAATACTCCAATAGACGGTGGGCATGTTCTTAGTCAATCAGCTAACTTCTATTTAGGAATTGTGGGACAAGCTATTTTAGGTACGGCTATTTTTCTTGCTTGCTTAACAACAGCTACTGGATTAATCACTGCTTGTGCGGAATACTTCCACAAATTACTTCCAAAGATTAGTCACATTACTTGGGCTACAATCTTGACTTTAATTGCTATTACGTTCTATTTTGGTGGTTTATCAGAGATTATCCGTTGGTCACTACCAGTTCTCTACCTTCTCTATCCATTAACTATAGTCTTAATTTTCTTAGTCTTTTTTGATCAAAAATTTGAAAGTAGCCGCATTGTCTACCAAACTTCTATTGCCGCCACTGCTGTCGCTGCTTTATACGATGCCTTATCAAAACTCGGCGAAATGACTGGTTTATTTACCATTCCATCCGCTTTGACCACATTCTTTACTAAAGTTGTTCCTTTAGGTGAATATTCTATGGGATGGATTAGTTTTGCAATTTGTGGTGTCTTAGTTGGTCTTATTCTAAAAAAAGTAAAAGCA

SEQ ID NO: 21362 - protein, 443 aa, Streptococcus agalactiae
MLFALFFGAGNLIYPAYLGIYSGSNWAWAIIGFCLTGVTLPLLGVAAVAYSGATDVESFTKPVSKTYAIFFAVALYLSIGPFFAIPRTGATSFSVGIQPILGDSSLVKIIYGLIFFGISYFLAIRPSQIVDRIGKYLTPFLLTVISILIIASLIHPAAIVGTPHNASTNVSDAFKDLPFLAGLIQGYGTMDALASIAFAIIVIQASKQYGAITKKEITSMTLKSGAIATFLLAFIYIFVGRIGATSQSLFKFANGSFLLHNTPIDGGHVLSQSANFYLGIVGQAILGTAIFLACLTTATGLITACAEYFHKLLPKISHITWATILTLIAITFYFGGLSEIIRWSLPVLYLLYPLTIVLIFLVFFDQKFESSRIVYQTSIAATAVAALYDALSKLGEMTGLFTIPSALTTFFTKVVPLGEYSMGWISFAICGVLVGLILKKVKA

SEQ ID NO: 21363 - protein, 1053 aa, Streptococcus agalactiae
ATGAGAGCTGCAACTTATCTTTCAGCTAATGAATTATCACTTACTGATAAGGCTAAACCTCAAGTAATAAAACCCACAGATGCGGTTGTAAGACTTGTCAAAACAACTATTTGCGGTACTGATCTACATATCCTTGGTGGCGATGTTCCTGCTTGTAAACCAGGAACAACTTTAGGTCATGAAGGCATTGGTATCGTCGAAGAAGTTGGTTCTGCTGTCAATCATTTTAAAGTCGGAGATAAAGTAATTATTTCTTGTGTCACTGCCTGTAATACTTGCTATTACTGTAAGCACCAGTTGCCTTCACATTGTGAAGATGGCGGGTGGATTTTAGGACATCTTATTGAAGGTACTCAAGCAGAATATGTTCATATTCCACATGCAGATGGTAGCCTTTATCATGCACCTGAAGGTGTTTGTGACGATGCATTGGTTATGTTATCTGATATTTTACCAACTTCATACGAAATCGGCGTCTTACCTTCTCACATTAAACCAGGTGATACTGTTTGTATTGTAGGCGCTGGACCAATTGGACTATCTGCCTTACTAACTGCACAATTCTATTCTCCTGCCAAAATTATTATGGTTGATTTATCTCAAAAACGACTTGAAGCCTCTAAAAAATTTGGTGCAACACACACCATTCTATCAACGTCTACTCAAGAAGTTAAAGAAGAAATTGATAAAATTACCAAAGGCCGTGGCGTTGATGTCGTATTAGAATGTGTTGGTTATCCTGCAACATTTGATATTTGTCAAAATGTAGTTTCTATTGGAGGACATATCGCAAATGTTGGTGTTCATGGTAAACCTGTTGAATTTAACCTCCAAGATTTATGGATAAAAAATATAACCCTTAATACTGGATTAGTTAATGCTAATACAACTGAAATGCTCCTTGAAGTTCTTGAGACAGGCAAAATCGATGCAACACAACTAGTAACACATCACTTCAAGCTATCTGAAATCGAAGAAGCTTATAAGGTATTTAAAGCTGCTGAAGAAAACAATACTCTCAAAGTTATTATCGAAAACGATATTACTCCAGCC

SEQ ID NO: 21364 - protein, 351 aa, Streptococcus agalactiae; identical to SEQ ID NO: 7666

SEQ ID NO: 21365 - protein, 690 aa, Streptococcus agalactiae; identical to SEQ ID NO: 7667

SEQ ID NO: 21366 - protein, 230 aa, Streptococcus agalactiae; identical to SEQ ID NO: 3016

SEQ ID NO: 21367 - protein, 1068 aa, Streptococcus agalactiae
ATGAGTAAAGAACCAATTATTAAATTAGACAACATTGATGTTACTTTCCACCAAAAGAAACGTGAGATTAATGCTGTTAAAGATGTTACTATCCATATTAATCAAGGTGATATATATGGAATTGTCGGTTATTCAGGAGCCGGAAAATCTACCCTTGTTCGTGTTATTAATTTGCTACAAGAACCTTCAGCAGGTAAAATTACTATTGATGACCAAGTTATTTACGACAACAAGGTGACACTGACTAGCACACAATTACGCGAACAGCGCCGTGAAATTGGAATGATTTTTCAACATTTTAACCTAATGTCACAGTTGACAGCAGAACAGAATGTAGCTTTTGCTCTTAAACATTCAGGTTTATCAAAAGAGGCGAAAGCAGCTAAGGTTGCTAAATTATTAGAACTTGTTGGATTATCCGATCGTGCTCAAAACTATCCTTCACAATTATCAGGAGGGCAAAAACAGCGTGTTGCCATTGCGCGTGCATTGGCTAACGATCCTAAAATCTTAATTTCAGATGAGTCTACCTCTGCACTTGACCCTAAAACAACAAAACAAATACTTGCCCTTCTCCAAGATCTGAATAAAAAATTGGGACTTACGATTGTTTTGATTACACATGAGATGCAAATTGTCAAAGACATTGCTAATCGCGTTGCTGTTATGCAAAATGGTAAATTGATTGAAGAAGGATCAGTTTTAGACATTTTTTCACATCCTAGAGAGAGTCTTACACAAGATTTTATAAAAATAGCTACTGGGATTGATGAGGCAATGCTTAAGATTGAGCAACAAGAAGTTGTCAAAAATCTACCAGTAGGTAGCAAATTAGTTCAACTGAAATACGCTGGGCATAGCACGGATGAGCCGCTTTTAAATCAAATTTATAAAGAATTTGAAGTAACTGCTAACATCCTCTATGGGAATATTGAAATTTTAGATGGTATTCCAGTTGGAGAAATGGTAGTTATCTTATCAGGTGACGAAGAAAAATTAAGACAAGCCTGCCAAGCAATTACAGATTCGCAAGTTCAATTAACGTTATTGAAAGAAGGTGGTAAAGCA

SEQ ID NO: 21368 - protein, 356 aa, Streptococcus agalactiae; identical to SEQ ID NO: 3018

SEQ ID NO: 21369 - protein, 1374 aa, Streptococcus agalactiae
ATGACTTTAACAAACGAAGAAAATCAAATTCAAAAGTTTCTATCTGATACTATTGTTCAGGATGATATCAATATTTTAAGAGATTTAATTGCAATTAAGTCAATTTTTGCTCAGAAAGTTGGTTTAAATGACTTATCAAGCTATCTTGGAGAAGTTTTCATAAAAGCTGGCGCAGAAGTCATTATAGATGACAGCTATAGCGCTCCCTTTATCGTGGCAAATTTCAAATCATCAAAAGTAGATGCTAAGCGTATTATTTTTTACAATCATTATGATACTGTACCAGCAGATGAGGTAGAACAGTGGACTGAGGACCCTTTTACACTTTCACTTCGATATGGTAAGATGTATGGACGTGGTGTAGATGATGATAAAGGTCACATTACCGCACGTTTATCAGCAGTTAAAAAATATTTATCAAGACACAAAGGGGAACTTCCTCTAGATATCACTTTTATTGTGGAAGGAGCAGAGGAATCAGCTTCAGTAGGCCTTGATTATTATTTAGAAAAGTATCAAGAGCAGCTACAAGGGGCTGATTTGATCGTGTGGGAAGATGGCCCTAAAAATCCTAAAGGACAGTTGGAAATTGCTGGTGGAAATAAAGGCATTGTCACTTTTGATTTATCAGTAAGTTCAGCGGATGTTGATATTCATTCATCCTTTGGTGGGGTTGTTGATTCCTCGACATGGTATTTAATTCAAGCCCTCAATACGTTAAGGGATAACAAAGGTCATATATTGGTAGAAGGTATTTATGATAAAGTTATTCCCCCTACTAAGAGAGAGTTAGAATTAGTTGAAAAATATTCTTATAGATCTGCAAAGGCGCTAGAAGGTGCTTACCAATTAGTTTTGCCCAGTTTAGCAGATAGTCATAAAACTTTTTTGAGAAAGCTTTATTTTGAACCTTCTATAGCCATTGAAGGTATAACCTCAGGTTATCAAGGTGAAGGCGTCAAAACAATTTTACCTGCTTATGCTAAATGTAAAGCAGAGGTTAGGTTAGTACCAGGGTTAACCCCGAAAGGTGTACTAGATTCAATACAAAATCATTTGAAAGAGAATGGCTTTAAAGACATTGAGCTAACCTATACCCTTGGTGAAATGTCTTATCGTAGTGATATGTCAGCGCCATCTATCCTAAAGGTTGTTGATTTAGCTGAGCAATTTTATCCAGAAGGGATATCTCTGTTACCTACCTCACCAGGTACAGGACCAATGTATTTAGTTCATCAAGCTCTAAGAGCGCCAATTGCAGCTATTGGCATAGGACATGCCAATAGTCGAGACCATGGCGTTGATGAAAATGTTAGTATTGCTGATTATTACACCCATATTGAATTAGTGGAGGCTTTAATAGAATCATATGAG

SEQ ID NO: 21370 - protein, 458 aa, Streptococcus agalactiae; identical to SEQ ID NO: 3020

SEQ ID NO: 21371 - protein, 882 aa, Streptococcus agalactiae
TTGATTCTAATAACTTCCTATGGGATAATATCTTTATCACAAAAATTGAGGGAATTTATTATGAAGTTAAAACATATTGTCTTAGGATTAGCCTTAACAACACTTTTAGGAGTCACATTTAGTAATCAAGAAGTTTCAGCAAGCTCAACTTCAAGTAAAGTTGTTAAAGTTGGTGTTATGACCTTTTCTGACACTGAAAAAGCACGTTGGGATAAAATTGAAAAGCTAGTAGGTGATAAAGCTAAAATCAAATTTACAGAATTTACAGATTATACACAACCAAATCAAGCGACAGCCAATAAGGATGTGGATATTAATGCCTTTCAACATTACAATTTCTTAGAAAACTGGAATAAGGAAAATAAGAAAAACTTAATTCCACTTGAAAAGACTTACTTAGCTCCAATTCGTATCTATTCTGAGAAGGTAAAATCTCTTAAAAAATTGAAAAAAGGAGCCACTATTGCAATTCCAAATGATGCAACAAATGGTAGCCGTGCATTGTATGTCCTTCAGTCAGCAGGTTTAATCAAATTGAATGTTTCTGGTAAGAAGGTTGCAACAGTTGCTAATATCACATCTAATAAAAAGGATATTAATATTCAGGAGTTAGATGCGAGTCAAACACCACGTGCACTCAAAGATGTAGATGCAGCTATTATTAATAATACATACATTGAGCAAGCTAATTTAAAACCTTCAGATGCTATCTTTGTTGAGAAATCAGATAAAAATTCAAAACAATGGATTAATATCATTGCGGGACGTAAAAATTGGAAAAAGCAAAAGAACGCTAAAGCTATCCAAGCTATCTTGGATGCTTATCACACAGATGAAGTGAAAAAAGTTATCAAAGATACTTCAGCTGATATTCCACAATGG

SEQ ID NO: 21372 - protein, 294 aa, Streptococcus agalactiae
MILITSYGIISLSQKLREFIMKLKHIVLGLALTTLLGVTFSNQEVSASSTSSKVVKVGVMTFSDTEKARWDKIEKLVGDKAKIKFTEFTDYTQPNQATANKDVDINAFQHYNFLENWNKENKKNLIPLEKTYLAPIRIYSEKVKSLKKLKKGATIAIPNDATNGSRALYVLQSAGLIKLNVSGKKVATVANITSNKKDINIQELDASQTPRALKDVDAAIINNTYIEQANLKPSDAIFVEKSDKNSKQWINIIAGRKNWKKQKNAKAIQAILDAYHTDEVKKVIKDTSADIPQW

SEQ ID NO: 21373 - protein, 831 aa, Streptococcus agalactiae; identical to SEQ ID NO: 16553

SEQ ID NO: 21374 - protein, 277 aa, Streptococcus agalactiae; identical to SEQ ID NO: 11908

SEQ ID NO: 21375 - protein, 687 aa, Streptococcus agalactiae; identical to SEQ ID NO: 11909

SEQ ID NO: 21376 - protein, 229 aa, Streptococcus agalactiae; identical to SEQ ID NO: 3026

SEQ ID NO: 21377 - protein, 714 aa, Streptococcus agalactiae; identical to SEQ ID NO: 16559

SEQ ID NO: 21378 - protein, 238 aa, Streptococcus agalactiae; identical to SEQ ID NO: 3028

SEQ ID NO: 21379 - protein, 984 aa, Streptococcus agalactiae; identical to SEQ ID NO: 16573

SEQ ID NO: 21380 - protein, 328 aa, Streptococcus agalactiae; identical to SEQ ID NO: 3030

SEQ ID NO: 21381 - protein, 534 aa, Streptococcus agalactiae; identical to SEQ ID NO: 16575

SEQ ID NO: 21382 - protein, 178 aa, Streptococcus agalactiae; identical to SEQ ID NO: 3032

SEQ ID NO: 21383 - protein, 111 aa, Streptococcus agalactiae; identical to SEQ ID NO: 16577

SEQ ID NO: 21384 - protein, 37 aa, Streptococcus agalactiae; identical to SEQ ID NO: 3034

SEQ ID NO: 21385 - protein, 987 aa, Streptococcus agalactiae; identical to SEQ ID NO: 11921

SEQ ID NO: 21386 - protein, 329 aa, Streptococcus agalactiae; identical to SEQ ID NO: 3036

SEQ ID NO: 21387 - protein, 576 aa, Streptococcus agalactiae; identical to SEQ ID NO: 11923

SEQ ID NO: 21388 - protein, 192 aa, Streptococcus agalactiae; identical to SEQ ID NO: 3038

SEQ ID NO: 21389 - protein, 372 aa, Streptococcus agalactiae; identical to SEQ ID NO: 7693

SEQ ID NO: 21390 - protein, 124 aa, Streptococcus agalactiae; identical to SEQ ID NO: 3040

SEQ ID NO: 21391 - protein, 711 aa, Streptococcus agalactiae; identical to SEQ ID NO: 11927

SEQ ID NO: 21392 - protein, 237 aa, Streptococcus agalactiae; identical to SEQ ID NO: 3042

SEQ ID NO: 21393 - protein, 402 aa, Streptococcus agalactiae; identical to SEQ ID NO: 16589

SEQ ID NO: 21394 - protein, 134 aa, Streptococcus agalactiae; identical to SEQ ID NO: 3044

SEQ ID NO: 21395 - protein, 711 aa, Streptococcus agalactiae
ATGAAAACAGTTAAAGAAATAAGTCACATTTCTGGTATTAGTGTGCGCACACTTCATTATTATGATGAAATAGATTTGTTATCTCCTTCATTTGTAGGAGAGAATGGTTATCGTTACTATGATGATGAATCACTGATTAAGTTACAAGAAATTTTGTTATTTAAGGAACTGGAATTTCCTCTTAAAAAAATAAAAGAGATAATGGATAGTCCAAATTATGATCGTAATCAAGCACTTCTTGATCAAATTAGGTGGCTGGAACTAAAGAAACAGCGACTAGAAGAAGTAATTGAACATGCAAAGTCTATCCAGAGGGGTAAAAATATGTCAGATTTTACAGCTTATAATCAAGAAGAATTAGAAGCATTTCAAGAGGAAGCTAGAACACGCTGGGGGGATACAGATAGTTACAAAGAATTTGAAAATAGCCATAGTAAGAATGATTTTTCAATGATTTCACAAGCTATGAGTCAGATTTTTAAAGACTTTGGACAGTTGAAAGAACTTTCTCCGACAGATGAGAAAGTTCAAAAACAAGTTCAGATTTTACAAGATTATATCACAGCTCAGTTTTACAACTGCACTAACGATTTATTAGCAAGTCTTGGAATAATGTACATCCAAGATGAGCGTTTCCAAAAGTCTATTGATAATTGGGGAGGCCAGGGAACAGCATTATTTGTTTCTAAAGCTATAGATAGCTATTGTCAT

SEQ ID NO: 21396 - protein, 237 aa, Streptococcus agalactiae; identical to SEQ ID NO: 3046

SEQ ID NO: 21397 - protein, 1107 aa, Streptococcus agalactiae
ATGACAGTTACAGGAATTGTTGCCGAATTTAATCCCTTTCATAATGGGCATAAGTACCTTTTAGAACAAGCTCAAGGCATAAAAGTAATAGCCATGTCGGGTAATTTTATGCAACGTGGTGAGCCGGCGATTGTAGATAAATGGACCCGTTCCCAGATGGCACTAGAAAATGGTGCTGATTTAGTGATTGAACTCCCTTTTCTGGTTTCGGTACAGTCAGCGGATTATTTCGCTAGTGGAGCTGTGTCTATCCTGGCACGATTAGGTGTGGATAACTTATGCTTCGGTACCGAAGAAATGCTTGATTATGCCCGTATTGGGGATATTTATGTGAATAAAAAAGAGGAGATGGAAGCTTTTTTGAAAAAACAATCGGATTCTCTTTCCTATCCACAAAAAATGCAAGCTATGTGGCAAGAATTTGCAGGGATTACATTTTCGGGACAAACCCCAAATCACATTTTAGGCTTAGCCTACACCAAAGCAGCTAGCCAAAATGGTATTCGATTAAATCCGATACAACGTCAAGGAGCTGGTTATCATTCATCAGAAAAAACAGAGATATTTGCTTCTGCAACAAGTCTTCGTAAACATCAATCTGATCGTTTCTTTGTAGAAAAAGGTATGCCTAACAGTGACTTGTTTTTGAATAGTCCACAAGTAGTTTGGCAAGATTATTTTAGTTTACTCAAATATCAGATAATGACGCATTCTGATTTGACACAAATTTATCAAGTGAATGAAGAGATAGCCAATCGTATAAAAAGTCAAATTCGTTATGTGGAGACTGTGGATGAGTTAGTTGATAAAGTCGCAACTAAACGGTATACCAAAGCAAGAATTCGACGTTTATTAACCTATATCTTGATAAATGCTGTGGAAAGTCCTATACCAAATGCTATTCATGTCTTAGGTTTTACACAAAAAGGTCAACAGCATTTAAAGTCTGTGAAGAAGTCTGTGGATATCGTGACGAGGATTGGTTCACAAACGTGGGATAGTTTGACGCAACGAGCAGATTCTGTTTATCAGATGGGAAATGCTAATATAGCAGAGCAAACATGGGGACGTATCCCTTTTTATCAACCTGTTAGTCAAAGTGACCTT

SEQ ID NO: 21398 - protein, 369 aa, Streptococcus agalactiae; identical to SEQ ID NO: 11934

SEQ ID NO: 21399 - protein, 249 aa, Streptococcus agalactiae; identical to SEQ ID NO: 16597

SEQ ID NO: 21400 - protein, 83 aa, Streptococcus agalactiae; identical to SEQ ID NO: 3050

SEQ ID NO: 21401 - protein, 732 aa, Streptococcus agalactiae
ATGGCAACGTATGAAACTTTTGCAGCTGTTTATGATGCTGTCATGGATGATACTTTATATGCTAAATGGACTGATTTTTCACTTCGTCATTTTCCAAAAGGTAAGAAAAAACTTTTGGAATTAGCATGTGGTACGGGAATTCAGTCTGTTCGATTTGCACAAGCTGGTTATGCTGTTACAGGACTTGATCTTAGTGGCGATATGCTGAAACTTGCCAAAAAACGTGCAACTTCTGCTCACCAAAGTATCCAGTTTATTGAAGGAAATATGTTAGATTTATCTAATGTTGGTAAATATGATCTCATCACGTGCTATTCAGACTCTATTTGTTATATGCAAGATGAAGTCGAGGTTGGTGATGTTTTTATCGAAGTCTATAAGGCCTTAGAAGAAAATGGCGTCTTTATTTTTGATGTTCATTCGACTTATCAAACAGATAAAGTATTTCCTGGTTATTCTTATCATGAAAATGCAGATGACTTTGCTATGGTGTGGGATACTTATGAAGATGATGCACCTCATTCTATTGTCCATGAATTAACATTTTTTGTTCAAGAAGAAGATGGTCGATTTACACGTCATGATGAAGTTCATGAAGAGCGTACTTATGATATTTTGACTTATGATATTTTACTTGAACAGGCAGGTTTTAAAGATGTTAAGGTGTATGCAGATTTTGAAGATAAAAAACCAACTGCAACTTCTGCTCGCTGGTTTTTTGTAGCTCATAAA

SEQ ID NO: 21402 - protein, 244 aa, Streptococcus agalactiae; identical to SEQ ID NO: 3052

SEQ ID NO: 21403 - protein, 354 aa, Streptococcus agalactiae; identical to SEQ ID NO: 16601

SEQ ID NO: 21404 - protein, 118 aa, Streptococcus agalactiae; identical to SEQ ID NO: 16602

SEQ ID NO: 21405 - protein, 519 aa, Streptococcus agalactiae; identical to SEQ ID NO: 11941

SEQ ID NO: 21406 - protein, 173 aa, Streptococcus agalactiae; identical to SEQ ID NO: 11942

SEQ ID NO: 21407 - protein, 216 aa, Streptococcus agalactiae
ATGTCCACATTGGATAAAATCGTTTATGTAGCAGATTACATTGAACACAATCGAGATTTTCCAGGAGTTGAAGAAGCTCGTGAGTTAGCGAAAGTTGACCTTAATAAAGCAGTAGCTTATGAGACTGCTAGAACAGTTGCGTTTTTAGCAAGTAAGGCTCAGCCTATCTATCCTAAAACGATTGAAACCTATAATGCTTATATACCTTATCTCGAC

SEQ ID NO: 21408 - protein, 72 aa, Streptococcus agalactiae
MSTLDKIVYVADYIEHNRDFPGVEEARELAKVDLNKAVAYETARTVAFLASKAQPIYPKTIETYNAYIPYLD

SEQ ID NO: 21409 - protein, 134 aa, Streptococcus agalactiae
ATGACCTACAAAGATTACACAGGTTTAGATCGGACTGAACTTTTGAGTAAAGTGCGTCATATGATGTCCGACAAACGTTTTAATCATGTGTTAGGAGTAGAGCGTGCTGCAATAGAGTTAGCAGAACGGTATGG

SEQ ID NO: 21410 - protein, 45 aa, Streptococcus agalactiae
MTYKDYTGLDRTELLSKVRHMMSDKRFNHVLGVERAAIELAERYG

SEQ ID NO: 21411 - protein, 190 aa, Streptococcus agalactiae
ATGGTGCAGTTTGTTGGTGTTCAACGTCCAAAATATAAAGCTGGTACATCATATCCCGTTATTGGGTGGATCTGCCATTGATGGATATCTCATCAAGTATGATTCGTCAATTTATAAAAGTAATCGTCAGCCCAACTATTTACTGCCTAGAGAGGTATTAGATTATATCAGGAAAGAAGGTCTTTACAAA

SEQ ID NO: 21412 - protein, 64 aa, Streptococcus agalactiae
MVQFVGVQRPKYKAGTSYPVIWVDLPLMDISSSMIRQFIKSNRQPNYLLPREVLDYIRKEGLYK

SEQ ID NO: 21413 - protein, 284 aa, Streptococcus agalactiae
ATGGCACTCGAATTGCTAACACCATTTACAAAAGTTGAATTAGAAGAGAAAAAGCGAGATACTAACCGAAAACAAATTGGAATTATGGGAGGAAATTTTAACCCTGTTCATAACGCCCACCTTGTTGTTGCAGATCAAGTACGTCAGCAATTGTGTTTAGACCAAGTTCTGTTGATGCCTGAATTTCAGCCACCACATATTGATAAAAAAGAGACAATTGATGAACAGCATCGTCTCAAGATGCTGAATTAGCAATAAAAGGCATTGATGGTTTATCTNNNNNT

SEQ ID NO: 21414 - protein, 95 aa, Streptococcus agalactiae
  VARIANT 94, 95: Xaa = Any Amino Acid
MALELLTPFTKVELEEKKRDTNRKQIGIMGGNFNPVHNAHLVVADQVRQQLCLDQVLLMPEFQPPHIDKKETIDEQHRLKMLELAIKGIDGLSXX

SEQ ID NO: 21415 - protein, 315 aa, Streptococcus agalactiae; identical to SEQ ID NO: 11947

SEQ ID NO: 21416 - protein, 105 aa, Streptococcus agalactiae; identical to SEQ ID NO: 7720

SEQ ID NO: 21417 - protein, 1116 aa, Streptococcus agalactiae
ATGGAAGAGTTATTTTGTATTGGCTGCGGAGCCAGGATTCAAACTGAAAATAAAGATGCTGCTGGCTATACACCTCGTGCAGCACTTGAAAAAGGTTTAGAGACAGGAGAATTATACTGTCAGCGTTGTTTCAGATTGCGCCACTATAATGAGATTACTGACGTTCATATCACTGATGATGAATTTTTGAAATTACTACATGAGGTTGGAGATAGTGATGCCCTTGTGGTGAATGTCATTGATATTTTTGATTTCAATGGTTCAATTATTCCTGGTCTTAGTCGTTTCGTTGCAGGAAACGATGTTCTTTTAGTAGGAAATAAAAAAGATATTCTTCCCAAATCGGTTAAAGATGGAAAAGTAACACAATGGTTAACTGAGAGAGCTCATGAAGAGGGGCTTCGTCCTGTTGATGTCATCTTGACAAGTGCCCAAAATCATCATGCTATTAAGGATTTGATTGATACGATTGAAAAGTATCGTCATGGTCAAGATGTTTATGTTGTTGGGGTTACTAATGTTGGAAAGTCAACTCTTATTAACGCTATTATTCGTGAAATTACTGGTAGTCGTGATGTTATTACGACCTCACGTTTCCCAGGTACAACGTTAGATAAAATAGAAATACCTCTTGATGATGGTAGCTATATTTTTGATACCCCGGGTATTATTCATCGTCATCAAATGGCTCATTATTTGACAGCAAAAAATCTTAAATATGTTAGTCCTAAAAAAGAAATAAAACCCAAAACTTATCAGCTTAATTCAGAACAAACATTATTCTTGGCTGGCCTAGCACGTTTTGATTTTATTTCTGGTCAAAAACAAGGTTTTACGGCATATTTTGATAATAACCTGAATTTACACCGCACTAAACTAGTTGGAGCAGATGAATTTTACACTAAACATGTTGGAAAATTATTGACACCACCAACAGGTAAGGAAGTTTCAGATTTTCCTAAATTAGTTCGTCATGAATTTACAATCAAAGATAAAATGGATATTGTTTATTCGGGTCTTGGTTGGATACGTGTGAAATCAGAAGCAGAAAATCCAGTAGTAGTAGCTGCTTGGGCTCCAGAAGGCGTGGCAGTTGTTTTACGCAAAGCTTTAATT

SEQ ID NO: 21418 - protein, 372 aa, Streptococcus agalactiae
MEELFCIGCGARIQTENKDAAGYTPRAALEKGLETGELYCQRCFRLRHYNEITDVHITDDEFLKLLHEVGDSDALVVNVIDIFDFNGSIIPGLSRFVAGNDVLLVGNKKDILPKSVKDGKVTQWLTERAHEEGLRPVDVILTSAQNHHAIKDLIDTIEKYRHGQDVYVVGVTNVGKSTLINAIIREITGSRDVITTSRFPGTTLDKIEIPLDDGSYIFDTPGIIHRHQMAHYLTAKNLKYVSPKKEIKPKTYQLNSEQTLFLAGLARFDFISGQKQGFTAYFDNNLNLHRTKLVGADEFYTKHVGKLLTPPTGKEVSDFPKLVRHEFTIKDKMDIVYSGLGWIRVKSEAENPVVVAAWAPEGVAVVLRKALI

SEQ ID NO: 21419 - protein, 531 aa, Streptococcus agalactiae
ATGAAATTGAGTATAGATGATTATAGGCCGACCTTCGTGGTTGAGGCAGTTTATGATTTAAGAGCAGAAGATTTATTACGTCATGGCATTCGTGCGGTTTTAGTTGATTTAGATAATACACTCATTGCTTGGAATAATCCAGATGGTACTGCTGAGGTGCGTGCATGGTTAGATGAGATGACAACAGCGGATATTTCAGTTGTAGTAGTGTCTAATAACAATCATGCTCGCGTAGAACGTGCAGTATCACGTTTTGGTGTGGATTTTGTAAGTCGTGCGATGAAACCATTTACTCGTGGTATAAACATGGCAATTGAGCGTTATGGCTTTGATCGTGACGAGGTGATTATGGTTGGAGATCAATTGATGACAGATATTCGTGCTAGTCATCGCGCAGGAATAAAGTCCGTATTGGTAAAACCAATTGTTAAATCTGATGCTTGGAATACCAAGTTCAATCGCTTACGTGAACGTCGCGTTTGGAAAAAAATAGAAGAGAATTACGGTAAAATCGTATATCAAAAAGGAATT

SEQ ID NO: 21420 - protein, 177 aa, Streptococcus agalactiae; identical to SEQ ID NO: 7724

SEQ ID NO: 21421 - protein, 885 aa, Streptococcus agalactiae; identical to SEQ ID NO: 16615

SEQ ID NO: 21422 - protein, 295 aa, Streptococcus agalactiae; identical to SEQ ID NO: 11954

SEQ ID NO: 21423 - protein, 1440 aa, Streptococcus agalactiae
ATGAATTTTGAAACAGTCATTGGACTTGAAGTCCATGTTGAATTAAATACGAACTCTAAAATTTTCTCACCTTCTTCCGCTCATTTTGGTCAGGAACAAAATGCTAATACAAATGTAATTGACTGGTCTTTCCCAGGTGTCCTTCCAGTCATGAATAAAGGAGTTATTGATGCAGGAATCAAGGCGGCACTTGCCTTGAATATGGATATCCATCAAAACATGCATTTTGATCGTAAAAATTATTTCTATCCAGATAATCCTAAAGCTTATCAAATTTCACAGTTTGATGAGCCTATTGGTTACAATGGTTGGATTGAAATCGAATTAGAAGATGGTACACGAAAAAAAATTCGTATTGAGCGTGCCCACCTCGAAGAAGATGCAGGAAAAAATACACATGGGACAGATGGTTATTCCTATGTTGACCTTAATAGACAAGGTGTTCCACTGATTGAAATTGTATCAGAAGCTGATATGCGTTCTCCTGAGGAAGCTTATGCTTATTTGACAGCTCTCAAAGAGATTATCCAATATACTGGAATTTCTGACGTTAAAATGGAAGAAGGTTCTATGCGTGTAGATGCCAATATTTCACTTCGTCCTTATGGTCAAGAAGAGTTTGGTACTAAAGCAGAACTTAAGAACCTTAACTCATTCAATAATGTACGTAAAGGTTTGATACATGAAGAAAAACGTCAAGCACAAGTTTTACGATCTGGTGGTCAAATTCAGCAAGAGACTCGTCGTTTTGATGAAACAACAGGTGAGACTATTTTGATGCGTGTCAAGGAAGGCTCATCAGATTATCGCTATTTCCCTGAACCAGATTTACCACTATTTGATATCTCGGATGAATGGATTGATCAAGTTCGTTTAGAATTACCAGAATTTCCACAGGAACGTCGTGCGAAATATGTATCGTCTTTTGGTCTATCATCTTATGATGCTAGCCAATTAACAGCTACAAAAGCAACTTCTGATTTCTTTGAAAAAGCTGTTGCTATTGGGGGTGATGCAAAACAAGTTTCCAATTGGTTACAAGGAGAAGTGGCGCAATTTCTTAACAGTGAATCAAAATCAATCGAAGAAATTGGTCTGACTCCTGAGAATTTGGTTGAGATGATTGGCTTGATTGCTGACGGTACAATTTCATCCAAAATTGCTAAAAAAGTTTTTGTGCATTTAGCTAAAAATGGTGGTTCAGCTGAAGAATTCGTTAAAAAGGCTGGTTTAGTTCAAATTTCAGATCCTGAAGTATTAATCCCAATTATTCATCAAGTCTTTGCAGATAATGAAGCTGCTGTGATTGACTTTAAGTCAGGAAAACGCAATGCTGATAAGGCCTTCACAGGTTATCTAATGAAAGCAACAAAAGGACAAGCTAATCCACAAGTTGCTCTGAAGCTGTTAGCGCAAGAATTAGCAAAATTAAAAGAAGAA

SEQ ID NO: 21424 - protein, 480 aa, Streptococcus agalactiae; identical to SEQ ID NO: 3058

SEQ ID NO: 21425 - protein, 1464 aa, Streptococcus agalactiae; identical to SEQ ID NO: 16619

SEQ ID NO: 21426 - protein, 488 aa, Streptococcus agalactiae; identical to SEQ ID NO: 3060

SEQ ID NO: 21427 - protein, 300 aa, Streptococcus agalactiae
ATGAAAATTTCTGAAGAAGAAGTGCGTCATGTTGCCAATCTGTCAAAATTGCGCTTTTCTGATCAAGAGACTAAAGAATTTGCGTCAAGTTTGTCAAAGATTGTTGATATGATTGAACTCTTAAATGAAGTTGACACAGAAGGCGTACCAGTAACAACGACCATGGCAGATCGCAAAACCGTGATGCGTGAAGATATTGCTCAACCAGGCCATAATCGTGATGACTTATTTAAAAATGTACCACAGCATCAAGATTATTATATTAAAGTACCTGCAATTCTTGAGGATGGAGGAGATGCC

SEQ ID NO: 21428 - protein, 100 aa, Streptococcus agalactiae; identical to SEQ ID NO: 3062

SEQ ID NO: 21429 - protein, 2643 aa, Streptococcus agalactiae
ATGGAAACTAAGTTTGTGTATCATTTTGATGAAGGTTGTAAGGAAATGAAGGAACTGCTAGGTGGTAAGGGGGCTAATCTAGCTGAAATGACGAGTATTGGGTTACCGGTACCACAAGGTTTTACTATTACAACACAGGCTTGTAATGATTATTATGATAACGCTTGCCATATCCGAGAGAGTATTCTTAGTCAAATTGATCAAGCAATGGCACAATTGGAGGTTGAACAGAACAAGCAATTAGGAAGTGTTGATGATCCTTTGTTGGTGTCAGTTCGGTCAGGATCAGTTTTTTCAATGCCTGGTATGATGGACACAGTTTTAAATTTAGGGTTAAATGATCGTAGTGTCCAAGGTTTAGTGAAAAAGACAGAAGACGAGCGTTTTGCTTATGACAGTTATCGTCGTTTTATCCAAATGTTTGCAGATGTGGTTACAGGCATTCCAAAATATAAATTTGATACCATTTTAGATCGACTTAAGACAGATAAATGTTATCAAGATGACACAGAACTAACTGGTTCAGATTTAAAGAGACTTGTTGAATTTTACAAGGAACTATATCAAAAAGAAGCAGGAGAAAAATTTCCGCAAGATCCTAAAAGGCAGCTTTTGTTAGCAATTGAGGCAGTTTTTAAATCATGGAATAATCCAAGAGCTAAGATTTATCGTAAATTAAATGATATTCCGGAGACGCTTGGGACAGCCGTTAATATCCAAGCTATGGTTTTTGGGAATATGGGAAATAACAGCGGAACGGGAGTTGCTTTTACACGAAACCCATCAACTGGAGCAGCAAATTTATTTGGTGAGTATTTGATTAATGCACAAGGAGAAGATGTTGTTGCAGGTATCAGAACACCACAATCCATATCAAAATTGGCAGAACAAATGCCTATTATTTACCAAGAGTTTGTAAGCGTTACCCAAAAGTTAGAAGCTCATTATCGCGATATGCAAGATATGGAGTTTACAATTGAAAATGGTAATCTTTATATGCTTCAGACGAGAAGCGGTAAGCGTACAGCGAAGGCAGCTATCAAAATAGCAGTAGATCAAGTAAATGAAGGCCTAATTAGTAAAGAAGAAGCTATACTACGTATCGAGCCCAAACAATTAGATCAGTTATTACACCCTTCTTTTGACTTGAAAAGTTTAAAGAAAGCTATTATTTTGACGACAGGACTTCCAGCTTCTCCTGGAGCTGCTTATGGGAAAGTTTATTTCCATGCAGAAGATGTTGTTAAAGAGATGAAAAAGGGAAATCCAGTGCTATTGGTCAGACAAGAGACATCACCTGAAGATATCGAGGGGATGGTTAGTGCAAACGGGATTATAACAGCAAGAGGCGGAATGACTTCCCATGCGGCAGTAGTAGCCAGAGGAATGGGGAAACCATGCGTTGCAGGCTGTAGTCAATTATTGGTTGATGAAGTAAGACGAGAAATTTCTATTGGGCATCAAACGATAAAAGAAGGTGAGATGTTATCAATCGATGGTGCTACAGGAAATGTTTATATAGGACAAGTTCCGATGGCAGAGACTAGCGTAGATCGTGATTTTGAGATATTTATGAAATGGGTAGATGAAAATCGAGATATGATGGTGTGTTCAAATGCAGATAATCCGAGAGATGCTCAAAAGGCCTTGGACTTTGGAGCAGAAGGAATAGGTCTTTGTCGCACGGAACATATGTTTTTTGACGATGAACGTATTCCAGTCGTTAGAGAAATGATTTTAGCGGATGAAATATTGAGCCGAAGGAAGGCTCTAGAAAGGCTTTTATCTTTCCAAAGAGACGATTTTTATCAAATTTTTAAAGTATTGAAAGGTAAAGCTTGTACGATTCGTTTGCTTGACCCTCCTTTACATGAATTCTTACCCCATGATAAAGAGTCTATAGAATCTATGGCAAGACAAATGGGGATATCTACTTTAGCTATTGAAAAACGGATTCAAACATTAGAAGAATTCAACCCTATGTTAGGTCATCGTGGTTGTAGACTTGCGATTACCTATCCGGAAATTTACCAAATGCAGGTGAGAGCTCTTGTACAAGGCGCTATACTTGCAATGAAAGAGGGATATGAGGCAAAGCCAGAAATTATGATTCCTTTAGTGACAGCGCATGAAGAAATCTCTATAATACGTGATCTGATTGAAGAGACAATTGTTGAGGAGAGTAAATCTAAAAAAATTAACTTATCATTCCCTATTGGGACAATGATTGAAACACCAAGAGCTTGTATGATAGCGGATGATATTGCAAAGTTTGCGGATTTCTTTAGTTTTGGGACCAATGATTTAACACAAATGAGCTTTGGATTTTCACGAGATGATGCTGGAAAATTCTTAGGAGAATACGTTGATAAAGGACTTCTAAAAAAAGACCCTTTCCAAGTTTTAGATCAAAAAGGAATAGGAAGGTTTATTGAGCAGGCAGTGAGGTTAGGAAAAGAAGTTAAGCCAAACCTTAAAATAGGTATCTGTGGAGAGCATGGTGGAGAACCATCATCTATTGAGTTCTGTTACCAACTGGGGTTACATTATGTATCGTGTTCGCCGTTTAGGATTCCTATTGCTAAATTAGCGGCTGCACAGGCTAAAATCAAACAAAGCAGAAATGATATAACAATAGATAAA

SEQ ID NO: 21430 - protein, 881 aa, Streptococcus agalactiae
METKFVYHFDEGCKEMKELLGGKGANLAEMTSIGLPVPQGFTITTQACNDYYDNACHIRESILSQIDQAMAQLEVEQNKQLGSVDDPLLVSVRSGSVFSMPGMMDTVLNLGLNDRSVQGLVKKTEDERFAYDSYRRFIQMFADVVTGIPKYKFDTILDRLKTDKCYQDDTELTGSDLKRLVEFYKELYQKEAGEKFPQDPKRQLLLAIEAVFKSWNNPRAKIYRKLNDIPETLGTAVNIQAMVFGNMGNNSGTGVAFTRNPSTGAANLFGEYLINAQGEDVVAGIRTPQSISKLAEQMPIIYQEFVSVTQKLEAHYRDMQDMEFTIENGNLYMLQTRSGKRTAKAAIKIAVDQVNEGLISKEEAILRIEPKQLDQLLHPSFDLKSLKKAIILTTGLPASPGAAYGKVYFHAEDVVKEMKKGNPVLLVRQETSPEDIEGMVSANGIITARGGMTSHAAVVARGMGKPCVAGCSQLLVDEVRREISIGHQTIKEGEMLSIDGATGNVYIGQVPMAETSVDRDFEIFMKWVDENRDMMVCSNADNPRDAQKALDFGAEGIGLCRTEHMFFDDERIPVVREMILADEILSRRKALERLLSFQRDDFYQIFKVLKGKACTIRLLDPPLHEFLPHDKESIESMARQMGISTLAIEKRIQTLEEFNPMLGHRGCRLAITYPEIYQMQVRALVQGAILAMKEGYEAKPEIMIPLVTAHEEISIIRDLIEETIVEESKSKKINLSFPIGTMIETPRACMIADDIAKFADFFSFGTNDLTQMSFGFSRDDAGKFLGEYVDKGLLKKDPFQVLDQKGIGRFIEQAVRLGKEVKPNLKIGICGEHGGEPSSIEFCYQLGLHYVSCSPFRIPIAKLAAAQAKIKQSRNDITIDK

SEQ ID NO: 21431 - protein, 827 aa, Streptococcus agalactiae
ATGGAAGATCAACTCACTATATTTATTATTTCAGATTCTTTAGGGGAAACAGCCAAAGCTATTGCGAAAGCATGTTTGTCACAATTTCCAGGACATGATGATTGGCATTTTCAACGTTTTTCCTATATTAACAGTCAGGAACGCTTAGAACAAGTTTTTGAAGAGGCTAGCCAGAAGACAGTATTTATGATGTTTAGTTTAGTTGATGTTGCTTTGGCTTCCTATGCACAGAAACGATGTGAAAGTGAACATTATGCTTATGTTGACTTATTAACAAATGTTATTCAAGGAATATCAAGGATATCGGGTATAGATCCTTTGGGAGAACAGGGATTTTACGACGCTTAGACAATGATTATTTCAAAAGAGTAGAATCAATAGAATTTGCAGTAAAATATGATGATGGGAGAGATCCGCGAGGTATTTTACAAGCAGATTTAGTTATTATAGGAATTTCAAGAACTTCTAAAACACCATTAAGTATGTTTTTAGCAGATAAAAATATTAAAGTTATTAATATTCCTTTGGTTCCAGAGGTTCCTGTTCCTAAAGAATTACGTATGATTGATTCTAGAAGGATTATCGGACTAACTAATTCGGTTGATCATCTTAATCAAGTCCGAAAAGTTCGATTAAAGTCCTTAGGTCTTTCTAGTACGGCAAATTATGCCAGTTTAGAACGGATTTTGGAGGAGACGAGGTATGCTGAAGAAGTTATGAAAAATTTAGGTTGCCCAATCATTAATGTATCTGATAAAGCAATCGAAGAAACAGCAACGATTATTTTAGAAATCTTAAAAACAAATGGACAAGTAGCTAAAAATCTG

SEQ ID NO: 21432 - protein, 276 aa, Streptococcus agalactiae; identical to SEQ ID NO: 3066

SEQ ID NO: 21433 - protein, 495 aa, Streptococcus agalactiae; identical to SEQ ID NO: 11967

SEQ ID NO: 21434 - protein, 165 aa, Streptococcus agalactiae; identical to SEQ ID NO: 7738

SEQ ID NO: 21435 - protein, 1131 aa, Streptococcus agalactiae
TTGTATACTATTTATTTTATATGTTATATTATATATCTTTTTTTACTGAAATCAAGTAAAAAAAGATACTATTTTAAAAATAATCATACTATATATTTGCTTTTAGACATATCTTTTGTTAAACTTTCTTCGAAAACGTTTTCGAATATAAGTATCGGAGGTTGTAATATGACAATTAAAAATCTCACTGTTGCAGGAAGTGGCGTTCTAGGTAGTCAAATCGCCTTTCAAGCAGCTTACAAAGGAATGTCTGTCACCATATATGACATTAACGATGAAGCTTTAAATAAGGGAAAAGAACGCATCAAAAAATTAGCTAAAGTCTATCAATCAGAAATTGAAACAGCAAAAGAAGCATATAGTGATAAAGCTAAAAGTATCAAGTATAATAAAAACTTATTGCCTAGCTTAGACCATATTTTTCTTTCAAAAGTTGCCGATTCATTAGACTTGATTGCTGATTTACCAAACCAAATTACTTTTTCAAAAAACTTAGACCAAGCTGTAAGTGACGCCGATTTAGTAATCGAAGCTGTCCCAGAAACAGTTAATATAAAAGAAGATTTTTATAAACAATTAGCTAAAGTGGCACCTTCAAAGACAATCTTTGCAACAAATTCTTCAACACTTGTTCCAAGTCAGTTTGCTGATATAACAGGACGGCCTGACAAATTTTTAGCAATGCATTTCGCTAACAATATTTGGCAAAATAATATTGTTGAAATTATGGGACATAAGGGAACTGACGACGAGGTTATCAAAGAAGCTTTGGCATTCTCAAAAGATATTGGTATGGTGCCTTTACATATTCATAAAGAACAACCTGGCTATATTCTTAATTCAATACTAGTTCCATTCTTAGAGAGTGCACTAGCATTGTACTATGATAAGGTTTCTGATTCTGAAACTATTGATAAAACCTGGAAGTTAGGAACAGGAGCACCGATGGGACCTTTAGAAATTTTAGATATTATTGGCATCGATACCGCTTATAATATCATGAAGAATTATTCAGATACCAACAGCGATCCTAATAGTCTTCATGCTCACCTTGCAAAAATGCTTAAAGAAGAATTCATTGATAAAGGACGTACCGGTAAAGCTGCTGGACACGGCTTTTATGATTACGAC

SEQ ID NO: 21436 - protein, 377 aa, Streptococcus agalactiae
MYTIYFICYIIYLFLLKSSKKRYYFKNNHTIYLLLDISFVKLSSKTFSNISIGGCNMTIKNLTVAGSGVLGSQIAFQAAYKGMSVTIYDINDEALNKGKERIKKLAKVYQSEIETAKEAYSDKAKSIKYNKNLLPSLDHIFLSKVADSLDLIADLPNQITFSKNLDQAVSDADLVIEAVPETVNIKEDFYKQLAKVAPSKTIFATNSSTLVPSQFADITGRPDKFLAMHFANNIWQNNIVEIMGHKGTDDEVIKEALAFSKDIGMVPLHIHKEQPGYILNSILVPFLESALALYYDKVSDSETIDKTWKLGTGAPMGPLEILDIIGIDTAYNIMKNYSDTNSDPNSLHAHLAKMLKEEFIDKGRTGKAAGHGFYDYD

SEQ ID NO: 21437 - protein, 170 aa, Streptococcus agalactiae
TTGATATTGACAGGAGTATTGACAGATATTTGTGTATTACACACAGCAATTGATGCTTATAACTTAGGTTATAAAATTGAGGTCCCAGCAGCAGCTGTAGCTAGCTTAAATGATAGTAATCATCAATGGGTTTAAATCATTTTAAAACTGTTCTTGGTGCAACTATTCTT

SEQ ID NO: 21438 - protein, 57 aa, Streptococcus agalactiae
MILTGVLTDICVLHTAIDAYNLGYKIEVPAAAVASLNDSNHQWALNHFKTVLGATIL

SEQ ID NO: 21439 - protein, 114 aa, Streptococcus agalactiae
ATGAATAAAGGAGTTATTGATGCAGGAATCAAGGCGGCACTTGCCTTGAATATGGACATCCATCAAAACATGCTTTTTGATCGTAAAAATTATTTCTATCNNNNNTTAATTAAT

SEQ ID NO: 21440 - protein, 38 aa, Streptococcus agalactiae
  VARIANT 34, 35: Xaa = Any Amino Acid
MNKGVIDAGIKAALALNMDIHQNMLFDRKNYFYXXLIN

SEQ ID NO: 21441 - protein, 558 aa, Streptococcus agalactiae
ATGTTATCAATCGATGGTGCTACAGGAAATGTTTATATAGGACAAGTTCCGATGGCAGAGACTAGCGTAGATCGTGATTTGGAGATATTAATGAAATGGGTAGATGAAAATCGAGATATGATGGTGTGTTCAAATGCAGATAATCCGAGAGATGCTCAAAAGGCCTTGGACTTTGGAGCAGAAGGAATAGGTCTTTGTCGCACGGAACATATGTTTTTTGACGATGAACGTATTCCAGTCGTTAGAGAAATGATTTTAGCGGATGAAATATTGAGCCGAAGGAAGGCTCTAGAAAGGCTTTTATCTTTCCAAAGAGACGATTTTTATCAAATTTTTAAAGTATTGAAAGGTAAAGCTTGTACGATTCGTTTGCTTGACCCTCCTTTACATGAATTCTTACCCCATGATAAAGAGTCTATAGAATCTATGGCAAGACAAATGGGGATATCTACTTTAGCTATTGAAAAACGGATTCAAACATTAGAAGAATTCAACCCTATGTTAGGTCATCGTGGTTGTAGACTTACGATTACCTATCCGGAAATTACNNNNNTTAAT

SEQ ID NO: 21442 - protein, 186 aa, Streptococcus agalactiae
  VARIANT 184, 185: Xaa = Any Amino Acid
MLSIDGATGNVYIGQVPMAETSVDRDLEILMKWVDENRDMMVCSNADNPRDAQKALDFGAEGIGLCRTEHMFFDDERIPVVREMILADEILSRRKALERLLSFQRDDFYQIFKVLKGKACTIRLLDPPLHEFLPHDKESIESMARQMGISTLAIEKRIQTLEEFNPMLGHRGCRLTITYPEITXXN

SEQ ID NO: 21443 - protein, 219 aa, Streptococcus agalactiae
ATGACAAAAGCACTCATCTCAATAGACTACACATATGATTTTGTGGCAGATGATGGGAAATTAACGGCAGGTAAACCAGCGCAATCTATCGCTTCAGCTATAGCTGCGTACAGAGAAAGCATACCGGTCAGGGGATTATATTTTTTTTGCGATTGATATCATGATATTGGAGATGTTTTTCATCCAGAGAGCAATCTTTTTCCTGAGCATAATNNNNNT

SEQ ID NO: 21444 - protein, 74 aa, Streptococcus agalactiae
  VARIANT 37, 73, 74: Xaa = Any Amino Acid
MTKALISIDYTYDFVADDGKLTAGKPAQSIASAIADXTEKAYRSGDYIFFAIDNHDIGDVFHPESNLFPEHNXX

SEQ ID NO: 21445 - protein, 781 aa, Streptococcus agalactiae
ATGCCGAATTTATTAGAAAAAACTAGAAAAATTACATCCATCTTACAGCGTTCCGTAGATAGCTTAGATGCCGAACTACCATATAATACAATGGCGGCTCAATTAGCTGATATTATTGACTGTAACGCATGTATTATTAATGGTGGTGGTAACTTACTTGGCTATGCCTGAAATATAAAACAACACTGACCGTGTGGAAGAATTTTTTGAAACAAAACAATTCCCAGATTACTATGTTAAATCTGCTAGTCGTGTTTATGATACAGAAGCTAACTTATCAGTAGATAATGATTTGTCAATTTTCCCAGTTGAGACAAAGGAAAACTTCCAAGATGGTATTACAACAATCGCTCCAATTTATGGTGGTGGAATGCGCTTGGGAACATTTATTATCTGGCGTAATGATAAAGAATTTAGCGACGATGATTTGATTTTAGTTGAAATTGCAAGCACCGTTGTTGGTATTCAATTACTTAACCTTCAAACAGAAAATCTAGAAGAAAATATTCGTAAACAAACAGCGGTGACAATGGCTATCAACACTCTATCTTATTCTGAAATGAAAGCTGTAGCTGCTATCTTAGGAGAATTAGATGGACTTGAAGGACGCCTAACGGCATCTGTTATTGCAGACCGTATTGGAATTACACGTTCCGTTATTGTAAATGCTCTTCGTAAATTGGAGTCTGCGGGAATCATTGAGAGCCGCTCACTCGGTATGAAGGGAACATACCTCAAAGTTATTAACGAAGGTATTTTTGACAAATTAAAAGAATATAAT

SEQ ID NO: 21446 - protein, 261 aa, Streptococcus agalactiae; identical to SEQ ID NO: 7744

SEQ ID NO: 21447 - protein, 1129 aa, Streptococcus agalactiae
ATGAGGGCAAATGGTGAAAAGATATTGCGGTTAAATACTGGAAATCCAGCTGCCTTTGGCTTCGAAGCGCCAGATGAAGTCATTCGTGATTTAATTACGAATGCGCGTGAATCAGAAGGTTACTCTGATTCGAAAGGTATTTTTTCAGCTCGTAAGGCTGTTATGCAGTATTACCAGTTACAAAACATCCATGTTGACATGGATGATATATACATTGTTAATGGTGTTAGTGAGGGAATCTCTATGTCAATGCAAGCTTTGCTTGATAATGATGACGAGGTTCTAGTTCCAATGCCAGATTACCCGTTATGGACAGCTTGTGTTAGCCTTGCTGGTGGAAATGCTGTGCATTATATTTGTGATGAGGAAGCTAATTGGTATCCTGATATTGATGATATCAAATCAAAAATCACATCCAAAACAAAAGCAATTGTCCTCATTAATCCAAATAATCCAACTGGAGCAGTCTATCCGCGTGAAATTCTGCAAGAGATTGTGGATATCGCTAGACAAAATGACTTGATTATTTTTTCAGACGAGGTTTATGACCGTTTAGTTATGGATGGAATGGAGCATATCCCAATTGCTTCTATTGCAGAGGATATTTTTACAGTTACTTTATCTGGCTTATCTAAATCACATCGCATCTGTGGTTTCCGCGTTGGTTGGATGGTATTGTCTGGTCCGCGACAACATGTTAAAGGTTATATTGAAGGTTTGAATATGTTAGCTAACATGAGGCTGTGTTCAAATGTTCTTGCTCAACAGGTTATTCAAACATCGTTAGGCGGACAGCAATCTATTGATAGTATGTTGTTGCCAGGAGGTCGTATCTACGAGCAACGTAATTATATCCATAAAGCAATTAATGAAATACCTGGTTTATCTGCTGTAAAACCAAATGCTGGACTGTATCTTTTCCCTAAAATTGATACAGATATGTACCGTATTGATAATGATGAAGAGTTTGTGCTTAATTTCTTAAAACAAGAAAAAGTATTACTAACACACGGTAGAGGATTTAATATGAATACCGCTGACCATTTTAGAATTGTTTACTTACCACGGTTGATGAATTGACTGAACTACAAGAAAAAATGGCTCGCTTTTAAGCCNNNNNTTAATTAAT

SEQ ID NO: 21448 - protein, 377 aa, Streptococcus agalactiae
  VARIANT 373, 374: Xaa = Any Amino Acid
MRANGEKILRLNTGNPAAFGFEAPDEVIRDLITNARESEGYSDSKGIFSARKAVMQYYQLQNIHVDMDDIYIVNGVSEGISMSMQALLDNDDEVLVPMPDYPLWTACVSLAGGNAVHYICDEEANWYPDIDDIKSKITSKTKAIVLINPNNPTGAVYPREILQEIVDIARQNDLIIFSDEVYDRLVMDGMEHIPIASIAEDIFTVTLSGLSKSHRICGFRVGWMVLSGPRQHVKGYIEGLNMLANMRLCSNVLAQQVIQTSLGGQQSIDSMLLPGGRIYEQRNYIHKAINEIPGLSAVKPNAGLYLFPKIDTDMYRIDNDEEFVLNFLKQEKVLLTHGRGFNMNTADHFRIVYLPRVDELTELQEKMARFLSXXLIN

SEQ ID NO: 21449 - protein, 155 aa, Streptococcus agalactiae
TTGAGTGCAAGAGGTTATCTCTTTTGGTTATATTTAGAGGAGACAGGCTTATGTCACAAAAATATGAACGCATCCTTGTCGCTATTGATGGGATCACAGAATCTGAACTTGCTTTTGAAAAGGCAGTTAACGTTGCTCTTCGCAATGATTCTGAA

SEQ ID NO: 21450 - protein, 52 aa, Streptococcus agalactiae
MSARGYLFWLYLEEDRLMSQKYERILVAIDGITESELAFEKAVNVALRNDSE

SEQ ID NO: 21451 - protein, 1380 aa, Streptococcus agalactiae
GTGGCAATTAAGGCAGTATTTTTTGATATTGATGGTACACTTCTTAATGATCGTAAGAATGTACAAAAGTCAACAATTAAAGCAATTCGAAATTTGAAAGACCAAGGAATACTAGTCGGTTTAGCAACGGGGCGAGGTCCTAGTTTTGTACAACCTTTTTTAGAAAACCTTGGTTTAGATTTTGCTGTAACCTATAATGGTCAATATATCTATAGTAGAAGTGAAATTATTTATACCAATCAATTATCTAAGACAACTGTCTATCGTCTGATTCGTTATGCTGGAGCAAGAAGAAGAGAAATTTCATTAGGAACAGCCTCAGGATTACTCGGTTCAGGTATTATTGGTCTAGGAACTAGCCGTTTGGGGCAGATTGTATCTAGCCTTGTTCCGAGAAAATGGGCAAAAGCGATTGAACGAAGCTTTAAGCATTTTATTCGTCGGATTAAACCTCAAAATATTGATAGCCTCATGGTTATCTTACGAGAACCTATTTATCAGGTCGTTTTAGTTGCAACAGAGGGCGAATCAGAGCGAATTCAAAAACAATTTCCTCGTGTTAAATTAACAAGAAGCAGTCCTTACTCAATGGATGTCATTTCTGAAGGGCAGTCAAAAGTTAAGGGAATTGAACGTGTTGGTCAACGCTATGGTTTTGATCTATCCGAAGTGATAGCATTTGGAGATTCTGATAATGATATTGAGATGTTATCTCAAGTTGGCATTGGTGTTGCCATGGGGAACGCTAGTCAGCAAGTGAGAGAAAATGCACGTTATACAACTGCTGACAATAATGATGATGGTATCTCTAAGGCATTAGCCCATTATGGACTTATCCAATTTGAGATTGAAAAAACATTCAGTAGTCGTGACGAGAATTTCAATAAAGTAAAATCCTTCCATCTATTAATGGATGGTGAAACTATTGAAACGCCACGCTTATATGACAGTAAGGAAGCTGGTTTCAGGTCAGACTTTAAAGTAGAAGAAATCGTTGAGTTCTTGTATGCTGCTAGTCAAGGTAACCAAAAAGTATTTGACCAATCTATCCGTAATTTACACTTAGCTATTGATAAAGCAAGAGATAAGGTTATTTCTAAAGACCATCCAGAAACACCATTAGTGGGAGAAGTGGATGCCTTAACAGATTTACTTTATCTGACTTATGGCTCCTTTGTTCTTATGGGAGTCGACCCAAAACCTCTTTTTGATACAGTACATGAGGCCAATATGGGGAAAATCTTTCCAGATGGCAAAGCTCATTTTGATCCTGTTACTCATAAAATTTTAAAACCAGACGACTGGGAAGAACATTTCGCTCCTGAGCCATCAATTCGACGTGAATTAGATAGCCAAATTCAGAAATCCTTAAATCGAAAA

SEQ ID NO: 21452 - protein, 460 aa, Streptococcus agalactiae; identical to SEQ ID NO: 11980

SEQ ID NO: 21453 - protein, 891 aa, Streptococcus agalactiae
ATGTCCAGCGCCGATAACCCAATGAAATACGTTGATTTATCATTAGATGACCTTGATTTGACTGTTGTAGATTTTCTAAATCTTCCCAGTCCTCAAATCACCCCTCATCATATGCTTGATATCTATCACTATCTGAAGCAACATGCCAGTAATTTTGATGGTGTTGTCATTACGCATGGGACTGACACTTTAGAAGAAACAGCATATTTTTTAGACACAATGATACTCCCTAAAATCCCAATCATCATTACCGGTGCTATGAGAAGCACAAATGAACTTGGTAGCGATGGCGTTTATAATTACCTATCAGCCCTCCGTGTCGCTAATAGTACTAAAGCTGCCGACAAGGGGGTGCTAGTTGTCATGAATGATGAGATACATGCTGCTAAATATGTCACAAAAACACATACAACAAACGTTTCGACATTCCAAACCCCTACACATGGCCCCCTTGGGATTATTATGAAACAAGACCTGCTTTTCTTTAAAGCAACTGAAGAGAGAGTTCGTTTTGATTTAGATAAAATTACAGGAACTGTTCCTATCGTGAAAGCATATGCTGGCATGGGTGATAGTGGTATCATTAGCTTTTTAAATTCTCAAAATATTAGCGGATTAGTTATTGAAGCACTCGGTGCAGGGAATATGCCCCCAAAAGCTGCACAAGAAATCGAAGAATTAATTGAGCAAGGTGTCCCTGTTGTTCTAGTGTCTCGCTGTTTTAATGGTATTGCTGAGCCAGTTTACGGATATGAAGGTGGCGGAGCAAAATTACAAGAATCTGGTGTCATGTTTGTTAAAGAACTAAACGCTCCCAAAGCCAGACTCAAATTACTCATTGCACTCAATGCAGGTCTCACAGGGCAAAATCTAAAAGACTATATTGAAGGT

SEQ ID NO: 21454 - protein, 297 aa, Streptococcus agalactiae; identical to SEQ ID NO: 16648

SEQ ID NO: 21455 - protein, 876 aa, Streptococcus agalactiae
ATGAATTCATTAAATGGGGAAACTTTACTAACTGGTCTAATTGCCAATCCTGCACGCCACTCTCTATCCCCGTTAATGTGGAATACCTCTTTTCAAGAAAAAAACATGAATTATGCCTATCTGACATTTGAAGTAGAAGAGGGTAAATTAACAGAAGCTGTTCGAGGTGTCAGGGCATTGGGTATTCGTGGTGTTAATGTTTCAATGCCATTTAAACAGAGTGTTATCCCTTTGCTAGATGATTTATCTCCTCAAGCTAAATTAGTGGGTGCTGTAAATACTATCGTTAATCAAGGTGGAACCGGACGTTTAGTAGGCCATATGACAGATGGCATTGGTTGTTTTAAAGCTTTAGCAGCTCAAGGTTTCAGTGCTAAAAATAAAATAATTACAATAGCTGGTATTGGTGGTTCAGGTAAAGCAGTTGCAGTTCAAGCAGCTATGGAGGGAGTTGCGGAAATTAGATTATTTAATCGTAACAGCTCAAATTACGATAAGGTCATTGACTTATCAGATAAAATTAAAAAACAGTTTCAAATAAAGGTAGTCGTTGATTATCTAGAAAATAAGACAGCATTTAAAGACGCTATTAGAACTAGTCATTTTTATATTGATGCTACTAGTTTAGGAATGAGGCCATTAGATAATTATAGTTTAATTAACGATCCAGAAATTTTAACACCGAATTTAGTAGTTGTCGACTTGGTTTACAAGCCTAAAGAAACAGCATTGTTACGATTTGTTAGACAAAATGGAGTGAAACATGCTTATAATGGTCTAGGGATGCTGATTTATCAAGGAGCAGAAGCATTTCAATTAATAACGAATCAAGAAATGCCTATTAGCAGTGTTGAGAGAGTATTACAAACTGAAAAT

SEQ ID NO: 21456 - protein, 292 aa, Streptococcus agalactiae
MNSLNGETLLTGLIANPARHSLSPLMWNTSFQEKNMNYAYLTFEVEEGKLTEAVRGVRALGIRGVNVSMPFKQSVIPLLDDLSPQAKLVGAVNTIVNQGGTGRLVGHMTDGIGCFKALAAQGFSAKNKIITIAGIGGSGKAVAVQAAMEGVAEIRLFNRNSSNYDKVIDLSDKIKKQFQIKVVVDYLENKTAFKDAIRTSHFYIDATSLGMRPLDNYSLINDPEILTPNLVVVDLVYKPKETALLRFVRQNGVKHAYNGLGMLIYQGAEAFQLITNQEMPISSVERVLQTEN

SEQ ID NO: 21457 - protein, 912 aa, Streptococcus agalactiae; identical to SEQ ID NO: 16651

SEQ ID NO: 21458 - protein, 304 aa, Streptococcus agalactiae; identical to SEQ ID NO: 11990

SEQ ID NO: 21459 - protein, 2013 aa, Streptococcus agalactiae
ATGCTATTACAATCACCAATTTCTAATCTTAAGGGATTTGGACCAAAATCAGCAGAAAAATTTCAGAAATTAGATATTTATACAGTAGAAGATTTACTTCTTTATTATCCGTTTCGCTATGAAGATTTTAAATCAAAATCTGTTTTTGATTTAGTGGATGGTGAAAAAGCAGTCATTACAGGCCTAGTCGTTACTCCAGCTAATGTACAATATTATGGTTTTAAACGTAACCGTTTAAGTTTTAAGTTGCGTCAAGGGGAAGCTGTCTTAAATGTTAGTTTTTTTAATCAACCCTATTTAGCTGATAAAATAGAACTTGGTCAAGAGGTAGCTGTCTTTGGTAAATGGGATGCAACTAAATCAGCTATTACTGGGATGAAGGTTTTAGCTCAAGTTGAAGATGACATGCAACCTGTTTATCGCGTAGCTCAGGGAATTTCACAGTCTACTTTGATTAAAGCTATTAAGTCAGCTTTTGAAATCAGTGCGCATTTGGAATTGAAGGAAAATTTACCAGCTACTTTATTGGAAAAATACCGATTGATGGGTCGTAGTCAGGCTTGTTTAGCTATGCATTTCCCAAAAGATATCACAGAGTATAAGCAAGCGCTCCGTCGGATTAAATTTGAAGAATTATTTTACTTTCAAATGAACCTTCAAGTTTTGAAATCCGAAAATAAATCTGAAACAAATGGTTTGCCTATTCTTTATAGTAAACATGCTATGGAGACAAAAATTTCCTCTTTACCTTTTATTCTAACGAATGCTCAAAAGCGCTCTTTAGATGAAATATTATCTGATATGTCATCGGGAGCTCATATGAATCGTTTATTGCAAGGAGATGTAGGATCAGGAAAGACAGTCATTGCTGGTCTATCAATGTATGCAGCTTATACAGCAGGTTTTCAATCGGCTTTGATGGTTCCAACGGAAATCCTAGCTGAACAACACTACATTAGTCTGCAAGAGTTATTTCCAGATTTATCAATCGCTATATTAACTTCGGGTATGAAAGCAGCTGTTAAGCGTACGGTTTTAGCAGCTATTGCAAATGGCTCGGTTGATATGATTGTAGGAACTCATGCTCTTATCCAGGACTCGGTACAGTACCATAAACTGGGGCTTGTAATTACAGACGAGCAACATCGTTTTGGTGTTAAACAGCGTAGAATTTTCCGTGAAAAGGGAGAAAATCCTGATGTTTTAATGATGACAGCCACCCCAATTCCCCGAACTCTAGCAATCACAGCTTTTGGAGAAATGGATGTTTCTATTATTGATGAATTACCTGCCGGTCGTAAACCTATTATTACACGCTGGGTGAAACACGAGCAGCTAGGTACTGTGTTGGAATGGGTAAAAGGTGAATTGCAAAAAGATGCTCAAGTGTATGTCATTTCACCGTTGATTGAAGAGTCAGAAGCTTTAGATTTAAAGAATGCAGTAGCATTGCATGCTGAATTATCTACTTATTTTGAAGGAATTGCTAAGGTTGCTCTTGTACATGGACGTATGAAAAATGATGAAAAAGATGCTATAATGCAAGATTTCAAGGATAAAAAAAGTCATATTTTAGTATCTACAACAGTTATTGAAGTAGGGGTAAATGTCCCAAATGCAACGATCATGATTATTATGGATGCCGATCGTTTTGGATTAAGCCAGCTACATCAACTTCGTGGGCGTGTTGGTCGTGGATATAAACAATCATACGCTGTTTTAGTGGCTAATCCCAAAACTGATTCTGGGAAAAAACGAATGACAATCATGACAGAAACGACAGATGGTTTCGTTTTAGCTGAGTCGGATTTAAAAATGCGTGGTTCTGGTGAAATCTTTGGTACTCGTCAGTCTGGAATTCCAGAATTTCAAGTAGCTGATATCGTTGAGGATTATCCTATTTTAGAAGAAGCCAGACGTGTTGCTAGTGATATTGTCAAAGATAATAATTGGAAAGAAAATACAGAATGGGCACTTATTCTAGATAATTTACGCCAACATTCAGATTTTGAT

SEQ ID NO: 21460 - protein, 671 aa, Streptococcus agalactiae; identical to SEQ ID NO: 11992

SEQ ID NO: 21461 - protein, 1535 aa, Streptococcus agalactiae
ATGTCAAAACAAAAAGTAATGGCAACTTTGTTGTTATCCACTTTAGTCTTATCGCTATCATCACTTTAGTGACCTTAGCAGAAACTATTAATCCAGAAACAAGCCTGACAATGGCAACAGCATCAACAGAAAGTTCTTCTGAAGCAGAGAAACAGGAAAAAACACAACCTACAGATTCAGAAACTGCTTCACCTTCAGCCGAAGGAAGTATCTCAACAGAAAAAACAGAGATTGGTACGACAGAGACATCATCAAGCAATGAATCATCATCAAGTTCATCACATCAATCTTCTTCCAACGAAGATGCTAAAACATCTGATTCTGCTTCAACAGCATCTACTCCTAGCACTAATACTACAAACAGTAGTCAAGCAGACAGTAAGCCAGGTCAATCAACAAAGACTGAATTAAAACCTGAGCCTACCTTACCATTAGTAGAGCCTAAAATAACTCCCGCTCCGTCTCAGATAGAAAGTGTTCAGACAAATCAGAATGCTTCTGTTCCTGCTTTATCCTTTGATGATAACTTATTATCAACACCGATTTCACCAGTGACAGCAACGCCATTCTACGTAGAACACTGGTCTGGTCAGGATGCCTACTCTCACTATTTATTGTCACATCGTTACGGTATCAAAGCTGAACAATTAGATGGGTACTTAAAATCTTTAGGGATTCAATATGATTCTAATCGTATCAATGGTGCTAAGTTATTACAATGGGAAAAAGATAGTGGTTTAGATGTCCGTGCTATTGTAGCTATTGCTGTCCTTGAAAGTTCATTGGGAACTCAAGGAGTGGCTAAGATGCCAGGTGCTAATATGTTTGGTTATGGTGCCTTTGATCATGACTCTAGCCATGCTAGTGCTTATAATGATGAAGAAGCAATTATGTTGTTGACAAAAAATACAATTATTAAAAACAACAACTCTAGCTTTGAAATCCAAGATTTGAAAGCACAGAAATTATCTTCTGGACAACTTAATACAGTTACTGAGGGTGGTGTTTATTATACAGATAACTCTGGAACTGGTAAACGTCGTGCCCAGATTATGGAAGATTTAGACCGCTGGATTGATCAACATGGAGGGACACCAGAAATTCCTGCTGCCTTGAAAGCTTTATCGACAGCAAGTTTAGCAGATTTACCAAGTGGTTTTAGCTTATCAACAGCAGTTAACACAGCTAGCTATATTGCATCAACTTATCCATGGGGTGAATGTACATGGTATGTCTTTAACCGCGCTAAAGAGTTAGGTTATACATTTGATCCATTTATGGGTAATGGTGGAGATTGGCAACATAAGGCTGGTTTTGAAACAACACATTCACCAAAAGTAGGCTATGCTGTATCATTTTCACCAGGACAAGCTGGTGCTGATGGCACTTACGGTCACGTAGCTATTGTTGAAGAAGTTAAAAAAGATGGTTCAGTTCTTATTTCAGAATCTAATGCAATGGGACGTGGTATTGTCTCTTACCGTACTTTTAGTTCAGCACAAGCTGCACAATTAACTTATGTTATTGGCCATAAA

SEQ ID NO: 21462 - protein, 512 aa, Streptococcus agalactiae
  VARIANT 22: Xaa = Any Amino Acid
MSKQKVMATLLLSTLVLSLSSXLVTLAETINPETSLTMATASTESSSEAEKQEKTQPTDSETASPSAEGSISTEKTEIGTTETSSSNESSSSSSHQSSSNEDAKTSDSASTASTPSTNTTNSSQADSKPGQSTKTELKPEPTLPLVEPKITPAPSQIESVQTNQNASVPALSFDDNLLSTPISPVTATPFYVEHWSGQDAYSHYLLSHRYGIKAEQLDGYLKSLGIQYDSNRINGAKLLQWEKDSGLDVRAIVAIAVLESSLGTQGVAKMPGANMFGYGAFDHDSSHASAYNDEEAIMLLTKNTIIKNNNSSFEIQDLKAQKLSSGQLNTVTEGGVYYTDNSGTGKRRAQIMEDLDRWIDQHGGTPEIPAALKALSTASLADLPSGFSLSTAVNTASYIASTYPWGECTWYVFNRAKELGYTFDPFMGNGGDWQHKAGFETTHSPKVGYAVSFSPGQAGADGTYGHVAIVEEVKKDGSVLISESNAMGRGIVSYRTFSSAQAAQLTYVIGHK

SEQ ID NO: 21463 - protein, 1096 aa, Streptococcus agalactiae
ATGATTTCAAGTTATCATAGACCAACCAGAGCCTTGATAGATTTAGAGGCGATTGCAAATAACGTTAAATCTGTACAAGAGCACATTCCAAGTGATAAAAAAACATTTGCTGTAGTTAAGGCTAATGCTTATGGGCATGGTGCTGTTGAAGTTTCAAAATACATTGAGTCTATTGTAGATGGTTTTTGCGTATCCAATTTAGATGAGGCTATTGAGCTACGTCAAGCAGGAATTGTAAAAATGATATTGGTATTAGGTGTTGTTATGCCTGAGCAGGTTATACTAGCCAAAAATGAAAATATTACTCTAACAGTTGCTAGCTTGGAGTGGTTACGTTTATGTCAGACATCAGCAGTAGATTTATCTGGTCTAGAAGTACATATCAAAGTTGATAGTGGAATGGGACGTATAGGTGTTCGCCAGTTAGATGAAGGAAATAAGCTAATTTCTGAATTGGGGGAAAGTGGTGCCTCTGTCAAGGGGATTTTCACCCATTTTGCAACAGCTGATGAAGCCGATAACTGTAAATTCAATCAACAACTTACTTTTTTTAAAGACTTTATTTCAGGATTAGATAATTGTCCGGACCTTGTTCATGCTAGTAATTCTGCTACAAGCCTTTGGCATAGTGAGACAATTTTTAATGCCGTTAGATTGGGTGTTGTTATGTACGGCTTAAATCCAAGTGGAACTGATTTAGACTTACCTTACCCTATAAACCCTGCTTTAAGTTTAGAGTCTGAGCTAGTACATGTTAAACAACTACACGATGGTTCTCAAGTTGGCTATGGCGCAACCTATCAAGTTACTGGAGACGAATTTGTGGAACAGTACCGATTGGCTACGCTGATGGATGGACACGAGATATGCAAGGATTTTCAGTTATAGTAAATGGAGAACTTTGTGAAATTATTGGGCGTGTCTCGATGGATCAAATGACTATCCGTTTACCTCAAAAATATACTATCGGAACTAAAGTAACCTGATTGGTCAACAAGGTAGTTGTAACATTACAACTACGGACGTCGCTCAAAAAAGACAGACGATTAATTATGAAGTACTTTGTCTTTTAAGCGATCGTATTCCGAGATATTAT

SEQ ID NO: 21464 - protein, 366 aa, Streptococcus agalactiae
  VARIANT 329: Xaa = Any Amino Acid
MISSYHRPTRALIDLEAIANNVKSVQEHIPSDKKTFAVVKANAYGHGAVEVSKYIESIVDGFCVSNLDEAIELRQAGIVKMILVLGVVMPEQVILAKNENITLTVASLEWLRLCQTSAVDLSGLEVHIKVDSGMGRIGVRQLDEGNKLISELGESGASVKGIFTHFATADEADNCKFNQQLTFFKDFISGLDNCPDLVHASNSATSLWHSETIFNAVRLGVVMYGLNPSGTDLDLPYPINPALSLESELVHVKQLHDGSQVGYGATYQVTGDEFVGTVPIGYADGWTRDMQGFSVIVNGELCEIIGRVSMDQMTIRLPQKYTIGTKVTXIGQQGSCNITTTDVAQKRQTINYEVLCLLSDRIPRYY

SEQ ID NO: 21465 - protein, 357 aa, Streptococcus agalactiae; identical to SEQ ID NO: 7765

SEQ ID NO: 21466 - protein, 119 aa, Streptococcus agalactiae; identical to SEQ ID NO: 7766

SEQ ID NO: 21467 - protein, 1005 aa, Streptococcus agalactiae; identical to SEQ ID NO: 12001

SEQ ID NO: 21468 - protein, 335 aa, Streptococcus agalactiae; identical to SEQ ID NO: 3080

SEQ ID NO: 21469 - protein, 2526 aa, Streptococcus agalactiae
ATGGCAAATATTCTACGCACTGTTATTGAAAATGACAAGGGTGAATTAAAAAAATTAGATAAAATAGCTAAGAAAGTTGACTCTTACGCAGATCATATGGCTGCGTTATCAGATGAAGCTTTACAAGCAAAAACTCCAGAATTTAAAGAACGTTATCAAAATGGTGAAACTTTAGATCAATTGTTACCGGAAGCGTTTGCGGTAGTTCGTGAAGCTTCTAAACGTGTATTAGGTTTATACCCATACCACGTCCAAATTATGGGTGGTATCGTTCTTCACCATGGTGATATTCCAGAAATGCGTACTGGTGAGGGAAAAACTTTAACAGCGACAATGCCTGTTTATCTAAATGCTATCTCAGGATTAGGTGTTCATGTTATTACTGTTAATGAGTATTTATCAACACGTGATGCGACCGAAATGGGTGAGGTTTATAGTTGGCTTGGATTATCTGTAGGGATTAACTTAGCAGCTAAGTCACCATTTGAAAAACGCGAAGCTTACAATTGTGATATCACATACTCAACTAACGCAGAAGTCGGATTTGACTACCTTCGAGACAATATGGTTGTTCGCCAAGAAGATATGGTGCAACGCCCACTCAACTATGCTTTGGTTGATGAGGTTGACTCTGTATTAATCGATGAAGCTAGGACGCCATTGATTGTTTCAGGTCCTGTAAGCTCTGAGATGAACCAACTGTATACACGTGCGGACATGTTTGTAAAAACGCTTAATAGCGATGATTATATCATTGATGTTCCAACAAAAACAATTGGTTTATCAGATACAGGTATTGACAAGGCTGAAAACTATTTCCATCTAAATAACTTGTATGATCTCGAAAATGTTGCCTTAACTCACTACATTGATAACGCTCTTCGAGCTAACTATATTATGTTGTTAAATATTGATTATGTGGTTAGTGAAGAACAAGAGATTTTAATTGTGGACCAATTTACCGGTCGTACGATGGAAGGACGTCGTTTCTCAGATGGCTTACACCAAGCTATTGAAGCAAAAGAGTCAGTGCCAATCCAAGAAGAATCAAAAACGAGCGCTTCAATTACTTACCAAAATATGTTCCGTATGTACCATAAATTAGCAGGAATGACTGGTACTGGTAAGACTGAGGAAGAAGAGTTTCGTGAAATTTATAATATGCGCGTTATTCCTATCCCAACAAATCGTCCTGTTCAACGTATAGATCATTCAGATCTACTTTATCCAACTCTTGACTCTAAATTTAGAGCGGTGGTAGCAGATGTCAAAGAACGTTATGAACAAGGACAACCTGTACTGGTTGGTACAGTAGCTGTTGAAACGTCAGACTTAATTTCTAGAAAATTAGTTGCTGCTGGAGTACCACATGAAGTTTTGAATGCTAAAAATCACTTTAAAGAAGCTCAAATCATTATGAATGCTGGGCAACGTGGTGCTGTTACAATCGCAACCAACATGGCTGGTCGTGGTACTGATATCAAGCTTGGTGAAGGGGTTCGTGAACTTGGTGGTTTATGTGTTATTGGTACAGAGCGTCATGAAAGCCGTCGTATTGATAACCAGCTTCGTGGTCGTTCGGGTCGTCAAGGAGATCCAGGTGAATCACAATTCTATCTTTCGTTAGAAGATGATTTGATGCGTCGCTTTGGTACAGATCGTATTAAAGTGGTTCTTGAGCGAATGAATTTAGCTGAAGATGATACAGTTATTAAATCAAAAATGTTGACACGACAAGTTGAATCAGCTCAACGCCGCGTTGAAGGTAATAACTATGACACACGTAAACAAGTCTTGCAATACGATGATGTTATGCGTGAACAACGTGAGATTATTTATGCTAACCGTAGAGAAGTGATTACTGCTGAGCGTGATTTAGGACCAGAGCTCAAAGGGATGATTAAACGTACGATTAAAAGAGCAGTTGATGCACATAGCAGAAGCGATAAAAATACTGCAGCAGAAGCTATTGTTAATTTTGCAAGATCGGCGTTATTAGATGAAGAAGCTATCACAGTTTCAGAACTTCGTGGTCTAAAAGAGGCTGAAATTAAAGAACTTCTTTATGAACGTGCCTTAGCTGTTTATGAGCAACAAATTGCTAAATTAAAAGATCCAGAAGCTATTATCGAATTCCAAAAAGTCTTAATCTTGATGGTAGTGGATAATCAATGGACAGAGCATATTGATGCCTTAGATCAATTACGTAACTCCGTTGGACTTCGTGGTTATGCTCAAAATAACCCAATCGTTGAGTATCAATCAGAAGGTTTCCGTATGTTCCAAGATATGATTGGTTCGATTGAGTTTGATGTGACACGTACATTGATGAAAGCTCAAATTCATGAACAAGAGCGTGAACGTGCTTCTCAACATGCTACGACAACAGCAGAGCAAAATATCTCGGCACAACATGTACCTATGAATAATGAATCACCAGAATACCAAGGGATTAAACGTAATGATAAATGTCCTTGTGGCTCTGGCATGAAGTTTAAAAATTGTCATGGTCTGAGATGTTTACAA

SEQ ID NO: 21470 - protein, 842 aa, Streptococcus agalactiae; identical to SEQ ID NO: 3082

SEQ ID NO: 21471 - protein, 945 aa, Streptococcus agalactiae; identical to SEQ ID NO: 12005

SEQ ID NO: 21472 - protein, 315 aa, Streptococcus agalactiae; identical to SEQ ID NO: 3084

SEQ ID NO: 21473 - protein, 879 aa, Streptococcus agalactiae
ATGACAAAGTTATATGGTAGTATTGAAGCAGGTGGGACAAAGTTTGTTTGTGCAGTTGGTGATGAGGAATTAAAAGTTGTAGAAAAAATGCAATTTCCAACAACGACGCCTCAAGAAACGATTAAAAAGACTGTTGATTTCTTTAAAAGATTTGAAAAGAAGTTAGAGGCAGTTGCTATTGGTTCTTTTGGTCCCATTGATATTGATAAAAAATCAAAGACATACGGTTATATCACAACGACCCCAAAGTTGCATTGGGCTAATGTTGATTTACTCGGCTTAATTTCTAAAGATTTCAATGTTCCATTTTATTTCACAACAGATGTTAATAGCTCTGCCTATGGTGAAGTTATAGCTCGTAACAATATTGATTCACTTGTTTATTACACCATTGGTACGGGAATTGGTGCAGGAGCTATACAAAAGGGTGAATTTATAGGAGGAACTGGTCATACTGAAGCAGGTCATACTTATATGGCGATGCATCCGCAGGACCAAGCAAATGATTTTAAAGGTATCTGTCCGTTTCATAATAGCTGTTTAGAAGGTTTGGCATCTGGTCCAACTCTAGAAGCTAGGACTGGTATTCGTGGTGAATTGATTGAAGAAAATTCAATGGTTTGGGATGTTCAAGCCTATTATATTGCTCAGGCTGCAATACAAGCAACTGTATTATATCGTCCACAAGTCATTGTATTTGGTGGAGGCGTCATGGCACAAGAGCACATGTTAAGACGTGTTCGCCAGACATTTGCAACTTTATTAAATGGGTATTTACCAGTTCCCGATTTGTCTGATTATATTGTGACACCAGCTATAGAAGAAAATGGTTCTGCAACGTTAGGAAATTTTGCTTTAGCAAAGAAAATATCAAAAGGT

SEQ ID NO: 21474 - protein, 293 aa, Streptococcus agalactiae; identical to SEQ ID NO: 3086

SEQ ID NO: 21475 - protein, 243 aa, Streptococcus agalactiae
TTGATTCATATAGGTATTGATACTGTCACCATGAATGGCACAGGGTTTACTTCTAAAGTCAAGGCAGACCAAAAAGTGAAAAAAGGTGATATTCTTGGCACCTTTGATTCAGCCAAGATTGCAGAAGCAGGTCTGGATAATACAGCTATGATTATTGTGACTAATACAGCTGATTTTGCTGATGTTGTACCATTGGTAAAAGAGGGTGTTGTTACTACAGGTGACATGATTATTGATGTTAAG

SEQ ID NO: 21476 - protein, 81 aa, Streptococcus agalactiae
MIHIGIDTVTMNGTGFTSKVKADQKVKKGDILGTFDSAKIAEAGLDNTAMIIVTNTADFADVVPLVKEGVVTTGDMIIDVK

SEQ ID NO: 21477 - protein, 351 aa, Streptococcus agalactiae
ATGTTATTACTGTTAATGGAGTATTTATCAACACGTGATGCGACCGAAATGGGTGAGGTTTATAGTTGGCTTGGATTATCTGTAGGGATTAACTTAGCAGCTAAGTCACCATTTGAAAAACGCGAAGCTTACAATTGTGATATCACATACTCAACTAACGCAGAAGTCGGATTTGACTACCTTCGAGACAATATGGTTGTTCGCCAAGAAGATATGGTGCAACGCCCACTCAACTATGCTTTGGTTGATGAGGTTGACTCTGTATTAATCGATGAAGCTAGGACGCCATTGATTGTTTCAGGTCCTGTAAGCTCTGAGATGACCAACTGTATACACGTGCGGACATGTTTG

SEQ ID NO: 21478 - protein, 117 aa, Streptococcus agalactiae
MLLLLMEYLSTRDATEMGEVYSWLGLSVGINLAAKSPFEKREAYNCDITYSTNAEVGFDYLRDNMVVRQEDMVQRPLNYALVDEVDSVLIDEARTPLIVSGPVSSEMTNCIHVRTCL

SEQ ID NO: 21479 - protein, 120 aa, Streptococcus agalactiae
ATGGGTGGTATCGTTCTTCACCATGGTGATATTCCAGAAATGCGTACTGGGGTGAGGGAAAAACTTTTTAACAGCGAAAACAATGGCCTGGTTTTTATTTCTAAATGCTATCTCAGGAAT

SEQ ID NO: 21480 - protein, 40 aa, Streptococcus agalactiae
MGGIVLHHGDIPEMRTGVREKLFNSENNGLVFISKCYLRN

SEQ ID NO: 21481 - protein, 1589 aa, Streptococcus agalactiae
ATGGCTTCAAATACAGAAATTGCTAAACAAGTCATTAATGCGATTGGTGGTGCTAGTAATGTGCGTAGCGTAGCACACTGTGCCACTCGTCTTCGCGTTATGGTAAAAGATGAGACAGTCATTGATAAAAATACTGTTGAAAATATCGAAAAAGTTCAGGGAGCATTTTTCAATTCAGGTCAATATCAAATTATTTTTGGAACTGGTACTGTTAATAAGATTTATGATGAAGTAGTGGCTCAAGGTTTGCCAACTTCGTCAACCTCTGATCAAAAGGCAGAAGCAGCTAAACAAGGGAATGCTTTCCAACGAGCTATTCGTACTTTCGGTGATGTTTTTGTTCCATTGTTGCCAGCCATTGTTGCTACTGGTTTATTTATGGGGATTCGCGGTGCGATTAATAATGATATAGTTTTAGCTTTATTTGGGACGACTTCAAAAGCATTTTCAAGTTCTAATTTTTATACCTATACTGTCGTTTTGACTGACACGGCCTTTGCTTTTTTTCCTGCCTTGATTTCTTGGTCAGCTTTTAGAGTTTTTGGTGGAAATCCTGTTATCGGTCTCGTATTAGGATTGATGATGGTCAACTCTGCCCTTCCAAACGCTTGGGCAGTGGCCTCAGGTGATGCCCATCCCATAAAATTTTTCGGTTTTATTCCAGTAGTTGGTTATCAAAATTCAGTATTGCCGGCATTCTTTGTAGGTTTACTTGGTGCTAAACTTGAAAAATGGTTGCATAAGAAAATCCCAGATGTTCTTGATTTACTATTAGTGCCGTTCCTAACTTTTACAGTTATGTCAATTTTAGCACTTTTTGTCTTGGTCCTATTTTCCTTCAGTTGAAAACTATGTTTTAGCAGGGACAAAATTTGTCCTTAATTTACCTCTTGGCCTGTCAGGTCTTATTTTAGGTGGTGTTCATCAGATAATCGTTGTTACAGGTGTTCATCATATCTTTAATTTACTTGAAGCTCAGTTAATTGCTGCTGATGGGAAAGATCCATTTAATGCTATTATTACAGCTGCTATGACAGCACAAGCAGGTGCCACTTTGGCAGTTGGTGTTAAAACAAAAAATAAAAAATTAAAAGCCCTTGCTTTTCCGGCAGCGCTTTCAGCTGGACTTGGTATTACAGAACCGGCTATATTTGGAGTAAACTTACGTTTTGGTAAGCCATTTATTATGGGATTAATTGCAGGAGCAGCAGGTGGCTGGTTAGCTTCAATATTGAAATTAGCAGGAACTGGTTTTGGTATTACCATTATCCCAGGAACATTACTTTATTTAAATGGTCAAATTGTTAAGTACCTTATTATGGTAATTGGAACTACGTCTTTGGCTTTTGTATTAACTTATATGTTTGGATATGAAGATAAAGATGAAAAAGCAGTAGCTGAAGTTAGTCCTTTGGTTGAAGAAACAGATGACGATCCACAATTACTCAAACTAGCCAATTAAGGGCAGAAACGATTGTTAGCCCTCTTGATGGACAGGTATTGCTCTTGATACAGTAAGTGACCCAGTTTTTTCATCAGGTATTATGGGAGATGGCCTTGCTATTAAACAAGAAGNNNNNTTAATTAAT

SEQ ID NO: 21482 - protein, 531 aa, Streptococcus agalactiae
  VARIANT 501, 527, 528: Xaa = Any Amino Acid
MASNTEIAKQVINAIGGASNVRSVAHCATRLRVMVKDETVIDKNTVENIEKVQGAFFNSGQYQIIFGTGTVNKIYDEVVAQGLPTSSTSDQKAEAAKQGNAFQRAIRTFGDVFVPLLPAIVATGLFMGIRGAINNDIVLALFGTTSKAFSSSNFYTYTVVLTDTAFAFFPALISWSAFRVFGGNPVIGLVLGLMMVNSALPNAWAVASGDAHPIKFFGFIPVVGYQNSVLPAFFVGLLGAKLEKWLHKKIPDVLDLLLVPFLTFTVMSILALFVIGPIFHSVENYVLAGTKFVLNLPLGLSGLILGGVHQIIVVTGVHHIFNLLEAQLIAADGKDPFNAIITAAMTAQAGATLAVGVKTKNKKLKALAFPAALSAGLGITEPAIFGVNLRFGKPFIMGLIAGAAGGWLASILKLAGTGFGITIIPGTLLYLNGQIVKYLIMVIGTTSLAFVLTYMFGYEDKDEKAVAEVSPLVEETDDDPTITQTSQLRAETIVSPLDGQXIALDTVSDPVFSSGIMGDGLAIKQEXXLIN

SEQ ID NO: 21483 - protein, 1436 aa, Streptococcus agalactiae
ATGAATTTACCCACTGAAATCCGCTATCGTCCTTATGATGAATGGACTGAAGAAGATAAGGAAAATATTGTAAAGAATGTCTCAAAATCCCCTTGGAGAGCAACTTATCACTTAGAAGCTAAAACAGGGCTTTTAAATGACCCAAATGGCTTCTCTTACTTTAATGGAAAATTCCATCTTTTTTACCAAAATTGGCCCTTTGGAGCTGCACATGGTTTAAAACAATGGGTACATACAGAATCAGATGATTTAGTTCATTTCAAAGAAACAGGAATCAAGCTTAACCTGACCATGTCAATGATAGCCATGGTGCATACTCCGGTTCTGCATTAGCCATTGACGATAAGCTTTTTCTTTTTTATACTGGTAATGTCCGTGACATGAAATGGAACCGTGACCCCCGCCAAATTGGAGCATGGATGACAAATGATGGCAAGATTACAAAATTTGATAAAGTCCTTATTTCACAACCAAATGATGTCACTGAGCATTTTCGTGACCCTCAGATTTTCAATTATGATAATCAATTCTATGCTGTTATCGGGGCGCAAAATAGTAAAAAATGCGGATTCATTAAATTATATAAAGCACTTAATAATGACATCCATCATTGGGAGTTTGTGGGAGATTTAGATTTTGGTGGTACTGGATCTGAGTATATGATTGAATGTCCAAATATTATTTTTGTCAAAGGAAAACCTGTATTACTTTATAGTCCTCAAGGACTAGATAAAAACGAATTGGACTACCAAAACATTTATCCAAATACCTACAAAATCGGACAATATTTCGATGCTAACTCATCTAAGATAGTTGAACCATCCCCTATCTATAATTTAGATTATGGTTTTGAAGCCTATGCTACTCAAGGATTTAACACTTCTGATGGTCGTGCCTTTATCGTGAGTTGGATAGGCTTGCCAGATATTGATTATCCTAGCGATCAATTTGATTATCAAGGAGCTATGAGTTTAGTTAAAGAGTTAAGCATAAAAAATGGGAACCTTTATCAATATCCCGTTCCTGCTATGAAAAATCTTCGTCAACATCAAGCAGAATTTAAAACACAACTTCAAACTAACAACACCTATGAATTAGAATTACTGGTTCCTAGAAATGATCTTTCTTCATTTGTTCTCTTTGCTAATCCGAAAGGACAAGGACTATCCATTACTATTGATACTGTAAAGGGGAAAGTTATCATTGACCGCTCACAAGCCGGACAGCAGTACGCCACAGAATTTGGTACTAGTCGCCAGTGTGACATTCCAAAAGATGCTACTAGTATCAATATTTTTATCGATAAGTCCATCTTTGAAATCTTTATAAATAAAGGAGAAAAAGTATTTACGGGACGAGTCTTTCCAGATGCAGAACAATCAGGGATTCAACTAAAAGAAGGGCACGTTCATGGTAAATATTTTGAATTAAAATAT

SEQ ID NO: 21484 - protein, 479 aa, Streptococcus agalactiae
  VARIANT 95: Xaa = Any Amino Acid
MNLPTEIRYRPYDEWTEEDKENIVKNVSKSPWRATYHLEAKTGLLNDPNGFSYFNGKFHLFYQNWPFGAAHGLKQWVHTESDDLVHFKETGIKLXPDHVNDSHGAYSGSALAIDDKLFLFYTGNVRDMKWNRDPRQIGAWMTNDGKITKFDKVLISQPNDVTEHFRDPQIFNYDNQFYAVIGAQNSKKCGFIKLYKALNNDIHHWEFVGDLDFGGTGSEYMIECPNIIFVKGKPVLLYSPQGLDKNELDYQNIYPNTYKIGQYFDANSSKIVEPSPIYNLDYGFEAYATQGFNTSDGRAFIVSWIGLPDIDYPSDQFDYQGAMSLVKELSIKNGNLYQYPVPAMKNLRQHQAEFKTQLQTNNTYELELLVPRNDLSSFVLFANPKGQGLSITIDTVKGKVIIDRSQAGQQYATEFGTSRQCDIPKDATSINIFIDKSIFEIFINKGEKVFTGRVFPDAEQSGIQLKEGHVHGKYFELKY

SEQ ID NO: 21485 - protein, 959 aa, Streptococcus agalactiae
ATGGTTGCAAAATTAACAGATGTTGCTGCACTTGCCGGTGTTAGCCCAACGACTGTATCACGCGTTATTAACAAAAAAGGCTATTTATCTCAAAAAACAGTCACCAAAGTCAATGAAGCCATGAGAACCCTTGGTTATAAACCTAATAATTTAGCACGTAGCTTACAGGGAAAGTCCGCTAAATTAATTGGACTCATTTTCCCCAACATCCGTAACATTTTTTACGCTGAATTAATTGAACACCTTGAAATTGAGTTGTTTAAGCATGGTTATAAAACTATCTTATGTAATAGTGAAAAGGATCCTATCAAAGAAAAAGAATACCTCGAAATGCTAGGAGCAAATCAAGTAGACGGTATCATTTCAAGTAGTCACAACCTAGGAATTGATGATTACGAGAAAGTTGAGGCTCCCATAGTAGCATTCGATAGAAATTTAGCTCCACACATCCCTATCGTCTCATCTGATAATTTCTTTGGAGGAAAAATGGCTGCTCAAACCCTTAAAAAACATGGCTGTCAAAAGATGATTATGATTACAGGGAATGATAATTCAGATTCTCCTACTGGACTTAGGCGGCTAGGTTTTTCCTATGAATCAAAGGAATCCAAAGTTATCACAGTCACAAATGGGCTATCTAACATGAGACGTGAGATGGAATTAAAATCAATTATCTCGACTCACAAACCAGATGGTATTTTACATCAGACGACTTAACTGCTTTATTAGTAATCAAACTTATCAGCCAACTAGGGTTGTCCATTCCAGAAGATATCAAAGTGATTGGATATGATGGTACAAGTTTCATTCAAGATTACGTCCCACATCTAACCACTATTAAACAACCTATTCGAGAAATTGCGCAATTGATGGTTGAGATACTCCTAGCTAAGATTGAGGGGCAAAAGACAAATAAGGATTATATTTTACCAGTCAGTCTCATCCCTGGTAGTAGCGTT

SEQ ID NO: 21486 - protein, 320 aa, Streptococcus agalactiae; identical to SEQ ID NO: 3092

SEQ ID NO: 21487 - protein, 432 aa, Streptococcus agalactiae; identical to SEQ ID NO: 7789

SEQ ID NO: 21488 - protein, 144 aa, Streptococcus agalactiae; identical to SEQ ID NO: 3094

SEQ ID NO: 21489 - protein, 387 aa, Streptococcus agalactiae; identical to SEQ ID NO: 12017

SEQ ID NO: 21490 - protein, 129 aa, Streptococcus agalactiae; identical to SEQ ID NO: 3096

SEQ ID NO: 21491 - protein, 558 aa, Streptococcus agalactiae
ATGATTGAAGCAAGTAAGCTTAAAGCAGGCATGACTTTTGAAACGGCTGATGGGAAATTAATCCGTGTTCTTGAAGCTAGCCACCACAAACCAGGTAAAGGTAACACAATCATGCGTATGAAATTGCGTGATGTTCGTACTGGTTCAACTTTTGATACAAGTTACCGTCCTGAAGAAAAATTTGAGCAAGCTATTATTGAAACTGTACCTGCTCAATACCTTTATAAGATGGATGATACAGCTTACTTCATGAATAATGAAACTTACGATCAATATGAAATTCCAACTGTTAACATTGAAAATGAATTACTCTACATTCTTGAAAACTCAGAAGTAAAAATTCAATTCTATGGAACAGAAGTTATTGGTGTTCAAATTCCAACAACTGTTGAATTGACAGTTGCTGAAACTCAACCATCAATCAAAGGTGCTACTGTAACTGGTTCAGGAAAACCTGCAACTATGGAAACAGGACTTGTTGTTAACGTTCCAGATTTTATTGAAGCTGGACAAAAGTTAGTAATCAATACAGCAGAAGGAACTTACGTTTCACGCGCC

SEQ ID NO: 21492 - protein, 186 aa, Streptococcus agalactiae; identical to SEQ ID NO: 3098

SEQ ID NO: 21493 - protein, 144 aa, Streptococcus agalactiae
GTGAATATGCTATTGATAGATGTCATGATACACTTATCAGAAGAAAACGAAAAGGGCTTTACTAAATTACAATTCTTTACTCGACAAATTGTGGTTGGTGTAAACTGGTATGTACTTCCCAAAATTGATAACTATTTCAACCCC

SEQ ID NO: 21494 - protein, 48 aa, Streptococcus agalactiae; identical to SEQ ID NO: 16682

SEQ ID NO: 21495 - protein, 297 aa, Streptococcus agalactiae
ATGTTATTACCAGTAGGGAGTGTTGTCTATCTTATTGATGGCAATCAAAAATTAGTTATTGTAAATAGAGGTGCAATTGTTGAGCAAGAAGGACAAGAAGTTTATTTTGATTACCTAGGTGGAATTTTTCCTGAGGGTTTAAATCTTGAACAAGTTTACTATTTTAATCAAGAAGATATTGATGAGGTTGTTTTTGAAGGTTACCATGATGAGGAGGAAGAAAGAGTTTCTCGTCTCATTGAAAAATGGAAAAATACAGAGGGAAAGAATCTTCCAAAGGGAAAGACTAGTGTAGAA

SEQ ID NO: 21496 - protein, 99 aa, Streptococcus agalactiae; identical to SEQ ID NO: 16684

SEQ ID NO: 21497 - protein, 90 aa, Streptococcus agalactiae; identical to SEQ ID NO: 12023

SEQ ID NO: 21498 - protein, 30 aa, Streptococcus agalactiae; identical to SEQ ID NO: 12024

SEQ ID NO: 21499 - protein, 228 aa, Streptococcus agalactiae; identical to SEQ ID NO: 16687

SEQ ID NO: 21500 - protein, 76 aa, Streptococcus agalactiae; identical to SEQ ID NO: 16688

SEQ ID NO: 21501 - protein, 123 aa, Streptococcus agalactiae; identical to SEQ ID NO: 12027

SEQ ID NO: 21502 - protein, 41 aa, Streptococcus agalactiae; identical to SEQ ID NO: 3100

SEQ ID NO: 21503 - protein, 162 aa, Streptococcus agalactiae; identical to SEQ ID NO: 16689

SEQ ID NO: 21504 - protein, 54 aa, Streptococcus agalactiae; identical to SEQ ID NO: 3102

SEQ ID NO: 21505 - protein, 450 aa, Streptococcus agalactiae; identical to SEQ ID NO: 7817

SEQ ID NO: 21506 - protein, 150 aa, Streptococcus agalactiae; identical to SEQ ID NO: 7818

SEQ ID NO: 21507 - protein, 612 aa, Streptococcus agalactiae
GTGTTGGATTTTATAAAGCCTGATCGAACAACTGAATTGCAAGTTGCTAATTTTTTAGACTTTCGCATGAGAGAATTAGGAGCAACTGGTCCTTCATTTGATTTTATTGTAGCATCTGGATATCGATCAGCGATGCCACATGGGGTTGCGAGTCAGAAGACTATTCAATCGGGAGAAACTCTGACTTTAGATTTTGGTTGTTACTATCAGCACTATGTTAGTGATATGACACGTACGATTCATATCGGTCATGTCACTGATCAGGAACGCGAGATTTACGATATCGTTTTGAAAAGTAATCAAGCTATTATTGATAATGTAAAATCAGGAATGAAGCGTTGTGATTATGATTACTTGGCGCGACAAGTCATTGAAAATTCTGGATACGGTAATCATTTTACCCACGGTATAGGGCATGGTATGGGGCTTGTTGTTCATGAAATTCCTTATTTTGGTAAGTCAGAGGGAGTGATTGCATCTGGGATGGTAGTGACTGACGAGCCAGGAATATATCTCGATAATAAATACGGTGTTCGTATTGAAGATGATTTATTAATAACGGAAACAGGTTGCGAAGTATTGACATCTGCACCTAAAGAATTAATTGTACTT

SEQ ID NO: 21508 - protein, 204 aa, Streptococcus agalactiae
MLDFIKPDRTTELQVANFLDFRMRELGATGPSFDFIVASGYRSAMPHGVASQKTIQSGETLTLDFGCYYQHYVSDMTRTIHIGHVTDQEREIYDIVLKSNQAIIDNVKSGMKRCDYDYLARQVIENSGYGNHFTHGIGHGMGLVVHEIPYFGKSEGVIASGMVVTDEPGIYLDNKYGVRIEDDLLITETGCEVLTSAPKELIVL

SEQ ID NO: 21509 - protein, 399 aa, Streptococcus agalactiae
ATGGGTTTTGAACAACGTCTAACTAGATGTCAAACAGCAATTTCACAATTATCATGTGACGCACTCTTAATAACAAATTTAACAAATATTTTTTATTTGACTGGTTTTTCAGGAACTAATGCAACGGTACTCATTAGTCCAAAACACCGGATTTTTGTTACAGATTCACGATATGCCTTGATAGCAAAGAATACTGTAAGAGAGTTTGATATTATCATTAGCAGAGAACCACTTGCGGCTATTTTGAAAATTATTCGCGATGACGCATTGATAGCGATTGGTTTTGAAACTGATATTTCTTATCATATGTACAAACATATGGTGGAAGTTTTTGAAGATTATCGCTTGATAGAAGCTCCATCTGTTGTTGAAAAGTTACGTATGATTAAAGATGTAACA

SEQ ID NO: 21510 - protein, 133 aa, Streptococcus agalactiae; identical to SEQ ID NO: 3108

SEQ ID NO: 21511 - protein, 714 aa, Streptococcus agalactiae; identical to SEQ ID NO: 16695

SEQ ID NO: 21512 - protein, 238 aa, Streptococcus agalactiae; identical to SEQ ID NO: 16696

SEQ ID NO: 21513 - protein, 1344 aa, Streptococcus agalactiae
TTGTCAACGGCTCAACAAGCAACAACATGGTTTTTATTAGCGAATGGGATTATGATTCCTGTTTCAGCTTATTTAGCGACACGTTTTTCAACAAAATGGTTGTATGTGACATCCTACGTTGTTTTACTTATTGGACTGTTAATGACGACGTTAGCACCTACATCTAACTGGAACCTTTTTTTAGTAGGACGTATTATTCAAGCGATTTCTGTAGGGATTTCTATGCCTTTGATGCAGGTTGTTATGGTGAATGTTTTTCCTCCAGAGCAGCGTGGTGCCGCTATGGGACTTAATGGTTTGGTGGTTGGTCTTGCCCCAGCTATTGGGCCTACATTAGCAGGGTGGATTTTAAAACAAGAATTTCATTTTGCAGGGCATGATTTAACATGGCGTGCAATTTTCCTTCTTCCTTTACTAATTTTAACGGTCACTACAATTTTATCCCCCTTTGTTCTAAAAGATGTGGTTGATAATAAGTCAGTTAAATTGGAAGTGCCTTCCCTTATCCTTTCAATAATTGGCTTTGGTAGCTTTTTGTGGGGCTTCACAAATGTGGCAACTTATGGATGGGGAGATATTGGATATGTTATTTCTCCTATTATGGTTGGTATTATTTTTATCGCCTTATTCATTCATCGTCAATTAAAACTAGAAACACCGTTCTTAGATATCCGTGTTTTCAAAAATAAACAATTCTCAGTAACAACAGCAGCTATTGCACTTTCAATGATGGCGATGATGGGTGTTGAAATGATGCTACCGCTTTACTTGCAAAATGTTCATGGTCTCTCTGCACTTGATTCTGGTTTAGCTTTATTACCAGGTGCCTTGATGATGGGGATAGTTAGTCCAATTTCTGGAGCTGTATATGATAAAGTTGGTGCAAGACGTATGGCTATGATTGGTTTTACCATACTAGGTGTAGCGACGTTACCTTTTGTTTTCTTAACGACTACAACACCAGATCATTTTATTACCCTCTTATATGCAGTACGTATGTTTGGTATTGCTATGGTTATGATGCCATTGACAGCAAGTGCGATGAGCGCACTTCCACCACATGAGGCCGCACATGGAACAGCAGCTAATAATACTGCTCGTCAAATTGCTTCAGCAGTTGTAGTTGCATTGCTTTCAAGTGTTGCTCAAAATATTATCACCAACAATAAACCATCAAAAGATTTGCTAACAATGAATCCTTTAAAATATGCAAATCAGATGTTGAATGCTAGTCTTGATGGCTTCCATGTTTCTTTTGCCATTGGTTTTGTATTTGCGGTTCTTGGTTTACTGGTATCTCTTTTCCTGAGAAAAGGGAAAATTATTGAGACGGAAAAGGAGGTA

SEQ ID NO: 21514 - protein, 448 aa, Streptococcus agalactiae
MSTAQQATTWFLLANGIMIPVSAYLATRFSTKWLYVTSYVVLLIGLLMTTLAPTSNWNLFLVGRIIQAISVGISMPLMQVVMVNVFPPEQRGAAMGLNGLVVGLAPAIGPTLAGWILKQEFHFAGHDLTWRAIFLLPLLILTVTTILSPFVLKDVVDNKSVKLEVPSLILSIIGFGSFLWGFTNVATYGWGDIGYVISPIMVGIIFIALFIHRQLKLETPFLDIRVFKNKQFSVTTAAIALSMMAMMGVEMMLPLYLQNVHGLSALDSGLALLPGALMMGIVSPISGAVYDKVGARRMAMIGFTILGVATLPFVFLTTTTPDHFITLLYAVRMFGIAMVMMPLTASAMSALPPHEAAHGTAANNTARQIASAVVVALLSSVAQNIITNNKPSKDLLTMNPLKYANQMLNASLDGFHVSFAIGFVFAVLGLLVSLFLRKGKIIETEKEV

SEQ ID NO: 21515 - protein, 153 aa, Streptococcus agalactiae
TTGAATAGTCTTCTGACTCGCAACCCATGTGGCATCGCTGATCGATATCCAGATGCTACCATAAAAATCAATGAAGGACCAGTTGCTCCTAATTCTCTCATGCGAAAGTCTAAAAAATTAGCACTTGCAATCCAGTTGGTCGATCAGGCTTTA

SEQ ID NO: 21516 - protein, 51 aa, Streptococcus agalactiae
MNSLLTRNPCGIADRYPDATIKINEGPVAPNSLMRKSKKLALAIQLVDQAL

SEQ ID NO: 21517 - protein, 128 aa, Streptococcus agalactiae
ATGACTACAAAAGCAAAACATGATATTCATGGCAAACCATATAATCGTACAGCCATGATCACCTTATTGTTGATGCTACATTTGCAGGGGTATTAAATCAGACAAGTTGGGAACGGATATCCCAACTT

SEQ ID NO: 21518 - protein, 43 aa, Streptococcus agalactiae
  VARIANT 25: Xaa = Any Amino Acid
MTTKAKHDIHGKPYNRTAMITLLLXATFAGVLNQTSWERISQL

SEQ ID NO: 21519 - protein, 2159 aa, Streptococcus agalactiae
GTGAAAGCGGCTCTACTTGTCGGATGGTTATGTCGTTATATACAATGGATGGCAATGAGTTATTGTTTTCAGAACATTATTCTTGTCCTGAATGTGGTTTTACTGTTCCTGAATTAGAGCCACGCCTTTTTTCTTTTAATGCTCCCTTTGGTTCTTGTCCGACCTGTGATGGCTTAGGAATTAAGTTAGAAGTAGATATAGATTTGGTTATTCCAGATAGAAGTAAGACCCTTAGAGAAGGGGCCTTAGTTCCTTGGAATCCAATTTCATCAAATTATTATCCAACGATGCTAGAGCAAGCTATGACTCAATTTGGTGTTGATATGGATACGCCATTTGAAAAATTAAGCAAGGCGGAGCAGGACCTAGCCCTATATGGTTCAGGCGAACGAGAGTTCCATTTCCATTATATTAACGATTTTGGAGGCGAGAGAAATATTGATTTGCCTTTTGAAGGGGTTGTCAATAATATTAATCGTCGTTACCATGAAACTAATAGCGATTACACACGCAATGTTATGCGAGAATATATGAACGAGCTAAAATGTAACACTTGTCATGGCTATCGTCTCAATGATCAAGCACTTTGCGTAAGAGTTGGGGGAGAAGAAGGTCTTAATATTGGGCAAGTCTCAGATTTATCGATAGCAGACCATTTAGAACTTTTAGAAACATTGCGTTTATCTTCAAATGAACAATTAATTGCTCGACCAATTATCAAAGAAATCCATGACCGTCTAAGTTTCTTAAATAATGTTGGACTTAATTATTTAAATCTGTCACGTTCTGCAGGAACACTTTCCGGGGGCGAGAGTCAACGTATTCGTTTGGCTACTCAAATTGGGTCTAATTTATCAGGTGTCCTTTATGTACTTGATGAGCCGTCCATTGGACTTCATCAGCGAGACAATGACCGTTTGATTGATAGTCTTAAGAAAATGCGTGATTTGGGTAATACGCTTATTGTTGTTGAACATGATGAAGATACAATGATGGCAGCTGATTGGTTAATCGATGTGGGACCTGGCGCTGGTGCGTTTGGTGGTGAGATTGTGGCCTCTGGTACACCGAAGCAAGTAGCTAAAAATACTAAATCTATTACAGGACAATATTTGTCAGGTAAGAAAGTGATTCCTGTGCCATCTGAACGAAGAGTAGGTAATGGTCGCTTTTTAGAAATCAAAGGTGCGGCAGAAAACAACCTACAAAATTTAGATGTCAAGTTCCCTCTCGGTAAATTTATTGCCGTAACTGGTGTCTCAGGTTCTGGAAAATCAACCTTAATTAATAGTATTTTGAAAAAAGCTGTTGCGCAGAAGCTTAACCGTAACTCAGATAAACCAGGTAAATATGTTTCTTTAGAAGGCATTGAATATGTTGATCGATTGATTGATATTGATCAAAGTCCAATTGGTCGGACTCCACGTTCTAATCCCGCAACCTATACAGGTGTTTTTGATGATATTCGTGATCTTTTTGCTCAAACTAATGAGGCAAAGATTCGAGGTTATAAAAAAGGACGCTTCTCATTTAACGTCAAAGGTGGACGTTGTGAGTCTTGTTCTGGCGATGGTATCATCAAAATTGAGATGCATTTTTTACCAGATGTCTACGTTCCTTGTGAAGTATGCCACGGCACGCGCTATAATAGTGAGACTCTGGAAGTACATTACAAAGAAAAAAATATTGCACAAATTCTTGATATGACAGTGAATGATGCAGTTACATTTTTTGCAGCTATTCCTAAAATTGCTCGTAAGTTACAGACTATTAAGGATGTTGGTTTGGGATATGTCACTTTGGGGCAACCAGCTACAACCTTATCAGGAGGAGAAGCTCAGCGAATGAAGCTGGCAAGTGAATTACATAAGCGTTCGACAGGTAAGAGTCTTTACATATTAGACGAACCAACAACGGGGCTTCATGCAGATGATATTGCTCGTTTACTTAAGGTTTTGGATCGTTTTGTAGATGATGGTAATACAGTGCTTGTTATTGAGCATAACCTTGATGTTATTAAAACTGCTGACCACATTATTGATCTTGGCCCTGAAGGAGGTATTGGTGGCGGACAAATTGTAGCTATCGGAACACCAGAAGAAGTTGCTGAAAATCCTAAATCCTATACAGGATATTATTTAAAAGAGAAGTTAGCAAGA

SEQ ID NO: 21520 - protein, 721 aa, Streptococcus agalactiae
MKAALRCRDGYVVIDTMDGNELLFSEHYSCPECGFTVPELEPRLFSFNAPFGSCPTCDGLGIKLEVDIDLVIPDRSKTLREGALVPWNPISSNYYPTMLEQAMTQFGVDMDTPFEKLSKAEQDLALYGSGEREFHFHYINDFGGERNIDLPFEGVVNNINRRYHETNSDYTRNVMREYMNELKCNTCHGYRLNDQALCVRVGGEEGLNIGQVSDLSIADHLELLETLRLSSNEQLIARPIIKEIHDRLSFLNNVGLNYLNLSRSAGTLSGGESQRIRLATQIGSNLSGVLYVLDEPSIGLHQRDNDRLIDSLKKMRDLGNTLIVVEHDEDTMMAADWLIDVGPGAGAFGGEIVASGTPKQVAKNTKSITGQYLSGKKVIPVPSERRVGNGRFLEIKGAAENNLQNLDVKFPLGKFIAVTGVSGSGKSTLINSILKKAVAQKLNRNSDKPGKYVSLEGIEYVDRLIDIDQSPIGRTPRSNPATYTGVFDDIRDLFAQTNEAKIRGYKKGRFSFNVKGGRCESCSGDGIIKIEMHFLPDVYVPCEVCHGTRYNSETLEVHYKEKNIAQILDMTVNDAVTFFAAIPKIARKLQTIKDVGLGYVTLGQPATTLSGGEAQRMKLASELHKRSTGKSLYILDEPTTGLHADDIARLLKVLDRFVDDGNTVLVIEHNLDVIKTADHIIDLGPEGGIGGGQIVAIGTPEEVAENPKSYTGYYLKEKLAR

SEQ ID NO: 21521 - protein, 938 aa, Streptococcus agalactiae
GTGTTTCCTCAAATAAAAGATTTGGCAGACGCTCCTGAAGAACAATTACTAAAGGCATGGGAGGGACTAGCTATTATTCTCGGGTGCGTAATATGCAAAAGCTGCACAGCAAGTGATGGTTGATTTTGGTGGCATATTTCCTCACACTTATGATGATATTGCTTCATTAAAAGGGATTGGTCCTTATACTGCAGGTGCTATCGCCAGCATCTCATTCAACTTACCAGAGCCTGCTGTTGATGGCAATGTGATGCGTGTCATGGCTCGTTTGTTTGAAGTTAATTATGACATCGGTGACCCTAAAAATCGTAAAATTTTTCAAGCTATTATGGAAATACTAATTGACCCTGACAGACCCGGTGATTTTAACCAAGCACTTATGGATCTGGGTACAGACATCGAATCCGCTAAGACACCTAGACCTGATGAAAGCCCTATTCGTTTCTTTAATGCTGCTTATTTGAATGGTACTTATAGTAAATATCCCATAAAAAATCCTAAGAAAAAGCCTAAACCAATGCGAATTCAGGCTTTTGTCATTCGTAACCAAAATGGTCAATATCTACTGGAGAAAAATACTAAAGGGAGACTTCTAGGGGGTTTTTGGTCATTTCCTATTATCGAAACGTCACCTCTTTCTCAACAATTAGATTTATTTGATGACAATCAATCCAACCCCATAATCTGGCAAACCCAAAATGAAACTTTCCAAAGAGAATATCAATTAAAGCCCCAATGGACTGATAATCACTTTCCAAATATTAAGCACACTTTTAGTCACCAGAAGTGGACAATAGAACTCATAGAGGGGGTGGTCAAAGCAACAGATTTACCTAATGCTCCTCACCTAAAGTGGGTAGCAATTGAGGACTTTTCTCTGTATCCCTTTGCAACACCACAAAAGAAAATGCTAGAGACCTACTTAAACAGAAAATGCT

SEQ ID NO: 21522 - protein, 314 aa, Streptococcus agalactiae
  VARIANT 24, 34: Xaa = Any Amino Acid
MFPQIKDLADAPEEQLLKAWEGLXYYSRVRNMQXAAQQVMVDFGGIFPHTYDDIASLKGIGPYTAGAIASISFNLPEPAVDGNVMRVMARLFEVNYDIGDPKNRKIFQAIMEILIDPDRPGDFNQALMDLGTDIESAKTPRPDESPIRFFNAAYLNGTYSKYPIKNPKKKPKPMRIQAFVIRNQNGQYLLEKNTKGRLLGGFWSFPIIETSPLSQQLDLFDDNQSNPIIWQTQNETFQREYQLKPQWTDNHFPNIKHTFSHQKWTIELIEGVVKATDLPNAPHLKWVAIEDFSLYPFATPQKKMLETYLKQKNA

SEQ ID NO: 21523 - protein, 591 aa, Streptococcus agalactiae; identical to SEQ ID NO: 16717

SEQ ID NO: 21524 - protein, 197 aa, Streptococcus agalactiae; identical to SEQ ID NO: 3128

SEQ ID NO: 21525 - protein, 312 aa, Streptococcus agalactiae; identical to SEQ ID NO: 16719

SEQ ID NO: 21526 - protein, 104 aa, Streptococcus agalactiae; identical to SEQ ID NO: 3130

SEQ ID NO: 21527 - protein, 498 aa, Streptococcus agalactiae; identical to SEQ ID NO: 7843

SEQ ID NO: 21528 - protein, 166 aa, Streptococcus agalactiae; identical to SEQ ID NO: 7844

SEQ ID NO: 21529 - protein, 2346 aa, Streptococcus agalactiae
ATGAAGAGTATGAATAACAAGATTTTAGAACAGTTAGAATTTAACAAAGTTAAGGAATTGATATTACCTTATCTCAAGACAGAACAATCACAAGAAGAATTATCAGAGCTGGAGCCGATGACGGAGGCTCCTAAAATAGAAAAAAGTTTTAATGAAATTTCTGACATGGAACAGATTTTTGTTGAACATCACTCATTTGGCATAGTCAGCCTAAGTTCAATCTCTGAGAGTTTAAAACGCTTAGAGCTTTCAGCTGATCTTAATATTCAAGAACTTTTGGCTATCAAAAAAGTTTTACAGAGTTCTTCGGATATGATTCACTTTTATTCTGATTTGGATAATGTTTCTTTCCAATCTTTGGATCGTTTGTTTGAAAATTTGGAACAATTCCCTAATCTGCAAGGGTCTTTTCAAGCTATCAATGATGGTGGTTTTTTAGAACATTTTGCGAGTCCAGAATTAGAGCGTATCCGTCGTCAATTAACAAACAGTGAACGACGGGTTCGTCAGATTTTACAGGATATGCTTAAGGAAAAAGCAGAGCTTTTATCAGAGAATCTAATCGCTAGTCGTAGTGGACGAAGTGTCCTACCAGTAAAAAATACTTATCGGAATCGTATTTCTGGTGTGGTTCATGACATCTCTTCTTCAGGAAGTACTGTTTATATTGAGCCTCGTGCTGTAGTTACACTAAACGAAGAGATAACGCAGCTTAGAGCTGACGAACGTCATGAAGAAAGTCGTATTTTACACGCATTTTCAGACTTGTTAAGACCCCATGTCGCCACTATTAGAAATAATGCATGGATTCTTGGGCATCTTGATTTTGTAAGGGCTAAATATCTTTTTATGTCTGATAATAAGGCGACGATACCTGAGATTTCTAATGACAGCACGTTAGCATTAATCAATGTTCGTCATCCTCTGTTAAGTAACCCTGTGGCTAATGACTTACATTTTGATCAAGATTTAACTGCAATTGTCATCACTGGTCCCAATACTGGTGGTAAGACGATTATGCTAAAAACACTCGGTTTAGCACAATTAATGGGACAGTCTGGTTTGCCAGTATTAGCGGATAAAGGTAGTAAAATTGCAGTATTTAACAATATCTTTGCAGATATTGGCGATGAGCAATCTATTGAACAAAGTCTATCAACTTTTTCTAGTCATATGACGCACATAGTCAGTATTTTAAACGAGGCTGACCACAATAGTTTAGTCCTCTTTGATGAACTGGGAGCAGGAACGGATCCTCAAGAAGGTGCTAGTTTGGCTATGGCTATTTTAGAACACCTTAGGTTAAGTAATATCAAAACGATGGCGACCACGCACTATCCAGAATTAAAAGCTTATGGGATTGAGACAAATTTTGTAGAGAATGCGAGCATGGAATTTGATGCCGAAACGCTTAGCCCTACGTATCGCTTTATGCAAGGAGTTCCTGGACGATCAAATGCATTTGAAATTGCTTCTCGCCTTGGTTTAGCTCCATTTATTGTTAAACAAGCTAAGCAGATGACAGATTCTGACTCAGATGTTAACCGTATTATTGAACAGTTAGAGGCACAGACACTTGAGACACGTAGAAGACTGGATCATATTAAAGAAGTTGAACAAGAAAACCTCAAATTCAATCGTGCGGTTAAGAAACTCTATAATGAATTTTCACATGAGCGCGATAAAGAGTTAGAAAAAATCTATCAAGAAGCTCAAGAAATTGTAGATATGGCTTTGAATGAGAGTGATACTATCTTAAAAAAACTCAATGATAAGAGCCAATTAAAACCTCACGAAATTATAGATGCTAAGGCACAAATAAAAAAATTAGCACCTCAAGTTGATTTATCAAAAAATAAAGTCTTAAATAAGGCTAAAAAAATTAAAGCAGCTCGTGCTCCTAGAATTGGTGATGATATTATAGTGACTAGCTATGGACAGCGAGGTACCTTAACTAGTCAATTAAAAGATGGACGTTGGGAAGCACAAGTGGGAATTATCAAAATGACATTAACACAAGATGAATTTACCCTTGTTAGAGTCCAAGAAGAACAGAAAGTCAAAAGTAAACAGATTAATGTGGTTAAAAAGGCTGATAGTTCTGGACCAAGAGCTCGACTTGATCTTAGAGGTAAAAGATACGAAGAAGCTATGCAAGAGTTAGATAATTTTATTGATCAAGCATTGCTTAACAATATGGGACAAGTTGATATCATTCATGGTATTGGTACAGGCGTTATCCGTGAGGGAGTGACAAAATATCTTCGTCGTAATAAGCACGTTAAGCATTTTGCTTATGCCCCACAAAATGCAGGGGGATCTGGCGCCACAATTGTAACGTTAGGG

SEQ ID NO: 21530 - protein, 782 aa, Streptococcus agalactiae; identical to SEQ ID NO: 3134

SEQ ID NO: 21531 - protein, 540 aa, Streptococcus agalactiae; identical to SEQ ID NO: 16725

SEQ ID NO: 21532 - protein, 180 aa, Streptococcus agalactiae; identical to SEQ ID NO: 3136

SEQ ID NO: 21533 - protein, 309 aa, Streptococcus agalactiae; identical to SEQ ID NO: 7849

SEQ ID NO: 21534 - protein, 103 aa, Streptococcus agalactiae; identical to SEQ ID NO: 3138

SEQ ID NO: 21535 - protein, 858 aa, Streptococcus agalactiae
TTGCAAGAAAAGATAAGAACCGATTTAGCTCAACATCATATAAGTAATAACAATCCTTATGTGGTATTTTCAGCTAAAATATCAGGAGCTACTGTTCTTTTATATACTTCTGGAAAACTTGTCTTCCAGGGTTCTAACGCTTCACATATCGCCCAAAAGTATGGTTTTATTGAGCAAAAAGAAAGTTGTTCCTCTGAGAGTCAAGATATTCCCATAATTGGTACTGATGAAGTGGGAAATGGCTCTTACTTTGGTGGACTGGCAGTGGTAGCTAGTTTTGTAACTCCTAAGGACCATGCTTACCTCAAAAAATTAGGTGTTGGTGATTCAAAAACACTTACTGATCAAAAAATTAAGCAAATCGCGCCTCTTTTGGAAAAAGCAATTCCACACAAAGCATTATTGTTATCGCCTCAAAAATATAATCAAGTGGTTAGTCCAAATAACAAACATAATGCTGTCTCCGTAAAAGTTGCTTTACACAATCAAGCTATCTTCCTTCTTCTTCAAGATGGTTTTGAACCAGAAAAAATCGTTATTGATGCTTTTACTAGCTCCAAAAACTATCAAAATTATTTGAAAAATGAAAAGAATCAATTTAAACAAACGATTACTCTGGAAGAAAAAGCTGAAAATAAATATCTAGCTGTAGCGGTCAGTTCTATTATTGCACGTAATCTATTCTTAGAAAACCTTAACAAATTAAGCGACGACGTAGGATATAAACTTCCAAGTGGAGCTGGTCACCAATCTGATAAGGTCGCTAGCCAATTACTCAAAGCTTATGGTATCTCTTCGCTTGAACACTGCGCAAAACTTCATTTTGCCAACACCAAAAAAGCACAAGCATTATTAAAA

SEQ ID NO: 21536 - protein, 286 aa, Streptococcus agalactiae; identical to SEQ ID NO: 3140

SEQ ID NO: 21537 - protein, 591 aa, Streptococcus agalactiae
ATGAAAGAATTTATTAAAGAATGGGGTGTCTTTATCCTCATCCTCTCACTTTTTTTACTATCGCGTATCTTTTTATGGCAATTCGTTAAAGTTGACGGACACTCCATGGATCCAACTTTAGCTGACAAGGAACAGCTAGTAGTTCTCAAACAAACAAAAATCAATCGATTCGATATTGTAGTGGCTAACGAAGAAGAAGGCGGCCAAAAGAAAAAAATTGTTAAACGTGTCATTGGTATGCCAGGTGATGTCATCAAATATAAAAATGACACCTTAACTATTAACAATAAAAAAACAGAAGAACCTTACCTCAAGGAATATACTAAATTATTTAAAAAGGATAAATTACAGGAAAAATATTCGTATAACCCACTTTTCCAAGACCTAGCACAAAGCTCTACCGCTTTCACCACTGACAGCAATGGCAGCAGCGAATTTACTACTGTCGTGCCTAAAGGCCACTACTATCTTGTTGGTGATGACCGAATTGTCTCTAAAGATAGTCGTGCCGTCGGTCCCTTCAAAAAATCAACGATTGTGGGAGAGGTTAAATTCCGCTTCTGGCCAATTCGTCGTTTTGGAACTATCAAC

SEQ ID NO: 21538 - protein, 197 aa, Streptococcus agalactiae; identical to SEQ ID NO: 3142

SEQ ID NO: 21539 - protein, 2417 aa, Streptococcus agalactiae
ATGGAAGTATTTTTTACAGGAACCATTGAACGCATTATATTTGAAAATGCCAGCAATTTTTTTAAAATATTACTTCTGGAAATCGAAGATACGGATAGCGATTTTGATGATGTAGAAGTAATTATTACTGGTACTATGGCCGACGTTATAGAGGGAGAAGAATATACTTTTTGGGGAACACTAACCCAACATCCAAAATACGGCGAGCAACTACAAAGTGTACGCTATGAAAGAGCCAAGCCTACTTCAGGTGGCCTTGTGAAATACTTTTCTAGCGAACAATTTAAAGGAATTGGTAAAAAGACTGCCCAACGCATCGTAGAACTCTATGGAGATAATACCATTGATAAAATCCTTGAATCCCCTGAACAGTTAAGTACAATCTCAGGACTATCAAAAATTAATAGAGAAGCATTCATCGCTAAACTGAAACTCAATTATGGAACAGAGCAAGTTTTAGCTAAACTCGCTGAATATGGGTTAAGCAATCGTGCTGCTATTCAAATATTTGATCACTATAAAGAAGAATCACTTGAAGTGATAAACGAAAATCCTTATCAACTTGTTGAGGATATCCAAGGTATCGGTTTTAAAATAGCTGACCAACTTGCTGAACAAGTCGGTATTGAAAGTGATTCTCCTAAACGCTTTCGTGCTGCTATTATTCATACTTTAGTTGAGTCTTCTATGGAGCAAGGAGATACCTATATTGAGGCTCGTACTCTCTTGGAAAAAACCATTACTCTCCTTGAAGAAGCTCGTCAAATCGAACTAGATCCTTCAATTGTTGCTAAGGAATTGACAAATTTAATTGCAGAAGATAAAGTGCAACATATTGGAACTAAAATTTTTAGTAATACTCTATTTTTTGCCGAAGAAGGCATCAAAAAAAACTTACAACGAATACTAAATCAGCCTCTTGATAAACAACTAAATCACAAAGATATTGACCGTGAAATCAGAGATATTCAAAAATCTTTAAATATCCACTACGATAATATCCAAGAAAAAGCTATTAGAGAAGCTTTACTAAGTAAGGTATTTATCTTGACTGGTGGCCCAGGAACAGGTAAAACAACAGTTATAAATGGTATTATTGAAGCCTATTCCGAGTTACATCATATTGATTTAAACAAAAATGATATTCCTATTGTACTTGCTGCTCCTACAGGTCGTGCTGCTAGACGCATGAATGAACTTACCGGTTTACCGAGTGCTACTATTCATAGGCATTTGGGATTAAACGGAGATAGTGACTATCAAAGTCTAGATGACTATCTAGATTGTTCCTTAATTATCATTGATGAATTTTCAATGGTTGACACTTGGCTTGCTAATCAATTATTTGACGCTTTGGACTCGCACACACAAGTTATTATTGTCGGAGATAGTGATCAATTACCGTCTGTAGGTCCAGGACAAGTTCTAGCAGATCTTTTAAATATAAATGCACTTCCACACGTTAAACTTGAAAAGATTTTTAGACAATCAGAAGAATCAACTATTGTGACTTTAGCTAATCAAATGAGACAGGGCTTTTTGCCAGAGGACTTTACAGCTAAAAAAGCCGATCGCTCATACTTTGAAGCATCTGCTAATATCATCCCAAATATGATTTCTAAAATTGTTCAATCTGCACTTAAGAGCGGTATTGAAGCTCATGAAATTCAAATTTTAGCTCCTATGTATCGCGGCCAAGCAGGTATTAATAATCTTAACCTTATCATGCAAAATCTCCTCAATCCATTAAAAGATAATAACCAATTTACTTTTAATGATATAAATTTCCGAATAGGAGATAAAGTGTTACATTTAGTCAACGATACAGAGCTTAATGTTTTTAATGGGGATATTGGTTACATAACGGACCTTATACCAGCCAAATATACTGAGAGCAAGCAAGATGAGATTTATATGACTTTTGACGGTCAAGAAGTTATCTATCAACGCAAAGAATGGCTTAAAATAACACTAGCCTATGCTATGAGTATTCATAAATCACAGGGTTCTGAATTTCAAGTTGTTATTCTGCCAATAACGAGACAGAGTGGTCGAATGTTACAGCGAAACCTTATTTATACAGCTATTACGAGATCTAAAAGTAAACTAATACTTTTAGGAGAAATTGGTGCATTTGATTTCGCTGTTAAAAACGAGGGGGCAAAGCGCAATACTTATCTGATAGAAAGATTGAAAACAAGCAAGAAATAGCTAATTCTCAAAAAATTGAAGATAGCTCAATAGATCAAAAGATTGACAACACAATAATTAATACGTCCATTCCAAAAACAGCAACACCAATTGAGCAGACTAATCTTTCAAAAATAACTTATCGCCTAACTGAAGAAAATTATTTAACAATCGATCCAATGATTGGTATTAATCAACAAGATATAAGTGCAATTTTTGATAGTAAA

SEQ ID NO: 21540 - protein, 806 aa, Streptococcus agalactiae; identical to SEQ ID NO: 3144

SEQ ID NO: 21541 - protein, 480 aa, Streptococcus agalactiae; identical to SEQ ID NO: 12073

SEQ ID NO: 21542 - protein, 160 aa, Streptococcus agalactiae; identical to SEQ ID NO: 3146

SEQ ID NO: 21543 - protein, 1092 aa, Streptococcus agalactiae
ATGTTAATTTTTCCTTTAATAAATGATACGTCGCGTAAAATTATCCACATTGATATGGATGCTTTTTTTGCATCTGTGGAAGAGCGTGACAATCCCTCTCTTAAAGGAAAGCCTGTTATTATTGGTTCTGATCCCAGAAAAACCGGCGGCAGAGGGGTTGTTTCTACTTGTAATTATGAGGCTCGAAAGTTTGGAGTTCATTCAGCTATGTCTTCAAAAGAAGCGTATGAACGATGCCCTCAAGCTATCTTTATTTCGGGAAATTACCAAAAATATCGCCAAGTAGGAATGGAAGTACGAGATATATTTAAAAAGTATACGGATTTGGTTGAACCGATGAGTATAGACGAAGCTTATTTAGATGTAACTGAAAATAAAATGGGAATAAAATCAGCTGTTAAACTTGCTAAAATGATACAATACGATATTTGGAATGATGTCCATTTGACCTGTTCAGCGGGTATTTCCTACAATAAATTTTTGGCAAAATTGGCTTCTGACTTTGAGAAACCAAAAGGACTTACCCTCATCCTACCAGATCAAGCTCAAGATTTCTTGAAGCCCTTACCAATAGAGAAATTTCATGGTGTTGGTAAACGCTCCGTCGAAAAATTACATGCTTTAGGGGTTTATACTGGTGAGGACCTCCTTTCCTTATCTGAAATTTCTTTAATTGATATGTTTGGTCGTTTCGGGTATGACCTTTATCGTAAGGCAAGAGGGATTAATGCTTCCCCGGTAAAACCTGATAGAGTTCGTAAATCAATAGGAAGTGAGAAAACCTATGGGAAATTACTATATAACGAAGCAGATATCAAAGCTGAGATTTCAAAGAACGTTCAGAGAGTTGTTGCTTCTCTGGAGAAAAATAAGAAAGTTGGTAAGACAATCGTTTTAAAAGTTAGATATGCGGATTTTGAAACATTGACGAAACGTATGACATTAGAAGAGTATACTCAAGATTTTCAAATCATTGATCAAGTTGCTAAAGCGATATTTGATACCTTAGAAGAGTCAGTTTTTGGCATACGACTCTTAGGTGTTACAGTAACGACCCTGGAAAATGAACATGAAGCTATCTATTTAGATTTT

SEQ ID NO: 21544 - protein, 364 aa, Streptococcus agalactiae; identical to SEQ ID NO: 3148

SEQ ID NO: 21545 - protein, 2310 aa, Streptococcus agalactiae
ATGGCAACAGTTAAAACAAACACAGATATCTTTGAACAAGCTTGGGAAGGCTTTAAAGGTGTTGATTGGAAAGAAAAAGCAAGTATTGCTCGCTTCGTTCAAGCAAACTATGCACCTTACGATGGAGATGAAAGCTTCTTAGCTGGAGCAACTGAACGTTCACTTCACATCAAAAAAGTGATTGAAGAAACAAAAGCTCACTATGAAGAAACTCGCTTCCCAATGGATACTCGTGTTGCTTCAATTTCTGAATTACCAGCTGGTTTTATCGACAAAGATAACGAGCTTATCTTTGGTATTCAAAACGACGAGCTTTTCAAATTGAACTTCATGCCTAAAGGTGGTATCCGTATGGCGGAAACTACACTTAAAGAAAATGGTTATGAACCTGATCCAGCTGTTCACGAAATCTTCACTAAGTACGCTACAACAGTAAATGATGGTATCTTCCGCGCTTATACTTCTAACATTCGTCGTGCTCGCCATGCACACACTGTTACTGGTCTTCCAGACGCTTATTCACGCGGACGTATCATTGGTGTATATGCTCGTCTAGCTGTTTACGGTGCTGACTACTTGATGCAAGAAAAAGTTAATGACTGGAATGCATTGAATGATATTGATGAAGAGTCAATTCGTCTTCGTGAAGAAATCAACCTTCAATACCAAGCTCTTGGTGAAGTTGTAAAACTTGGTGACCTTTACGGCGTAGATGTTCGTAAACCAGCCATGAACACTAAAGAAGCCATTCAATGGGTGAACATTGCTTTCATGGCTGTATGTCGTGTTATCAATGGTGCTGCAACATCACTTGGACGTGTTCCTATTGTCCTTGATATCTTTGCAGAACGTGACCTCGCTCGCGGTACATTCACAGAATCAGAAATCCAAGAATTTGTTGATGATTTTGTCCTTAAACTCCGTACTGTAAAATTTGCTCGTACTAAAGCTTATGATGCCCTTTACTCAGGTGACCCAACCTTTATCACAACTTCAATGGCAGGTATGGGAGCTGATGGACGTCATCGTGTTACCAAAATGGACTATCGTTTCTTAAATACACTTGACAATATCGGTAACTCACCAGAACCAAACTTAACTGTTCTTTGGTCAGATCAATTACCATATGCTTTCCGTCGCTACTGTATGTCAATGAGTCATAAACACTCTTCAATCCAATATGAAGGTGTATCAACAATGGCTAAAGAAGGCTACGGTGAAATGTCATGTATTTCATGTTGTGTATCTCCACTTGATCCAGAAAACGAAGACAAACGTCACAACCTTCAATATTTTGGTGCTCGTGTTAACGTTATGAAAGCACTTCTTACTGGTCTTAACGGTGGTTATGATGATGTTCATAAAGATTACAAAGTATTTGACATCGACCCAATTCGTGACGAAGTACTCAACTTTGACACTGTAAAAGCTAACTTTGAAAAATCTCTTGACTGGTTGACTGATACTTATGTTGATGCGATGAATATCATCCACTACATGACTGATAAATACAACTATGAAGCTGTACAAATGGCATTCTTACCTTCACATGTACGTGCTAATATGGGATTTGGTATCTGTGGTTTTGCAAATACTGTCGATTCATTATCTGCGATTAAATACGCTACTGTTAAACCAATCCGTGACGAAGATGGTTACATCTACGACTACGAAACAGTTGGTGACTTCCCACGTTATGGTGAAGATGATGATCGTGTTGACTCAATCGCTGAATGGTTACTTGAAGCCTTCCATGGACGCCTTGCTAAACACAAACTTTATAAAGATGCTGAAGCAACTGTTTCTCTTCTTACAATCACATCAAACGTTGCTTACTCTAAACAAACTGGTAACTCACCGGTACATAAAGGAGTATATCTCAATGAAGATGGTAGTGTAAACCTTTCTAAAGTAGAATTCTTCTCACCAGGTGCTAACCCTTCTAACAAAGCTAAAGGTGGCTGGTTACAAAACTTGAATTCACTTTCTAAACTTGATTTCGCTCATGCAAATGATGGTATTTCATTGACAACTCAAGTTTCTCCACGCGCTCTTGGTAAAACATTTGATGAACAAGTTGATAACTTGGTAACAGTCCTTGATGGTTACTTTGAAAACGGTGGTCAACACGTTAACTTGAATGTCATGGACCTTAAAGATGTCTATGACAAGATTATGAATGGTGAAGATGTTATCGTTCGTATCTCAGGTTACTGTGTCAATACTAAATATCTAACTCCTGAGCAAAAAACTGAGTTGACACAACGTGTCTTCCATGAAGTACTTTCAATGGACGATGCATTAACTAAC

SEQ ID NO: 21546 - protein, 770 aa, Streptococcus agalactiae; identical to SEQ ID NO: 3150

SEQ ID NO: 21547 - protein, 177 aa, Streptococcus agalactiae; identical to SEQ ID NO: 16743

SEQ ID NO: 21548 - protein, 59 aa, Streptococcus agalactiae; identical to SEQ ID NO: 16744

SEQ ID NO: 21549 - protein, 942 aa, Streptococcus agalactiae
TTGGATTTCAAAAGAATGATTAAAACTAATACTGTTTTAGAACTCATTAAGGAGCAAATCAAAGATAATCTTTATCATGGTGCAAGCTTAGCTATTTATGAAAATGGAGAGTGGCACGAACATTACTTGGGGACAATTGATGGCAATGAGAAAGTTAAAGCGGGATTGGTCTATGATCTAGCCAGTGTATCAAAAGTTGTCGGCGTGGGAACTTTACTAGCAAAGTTAGTTTATCAAGGGACTATTGATATTGATAAGCCATTAAGGTATTATTACCCTACGTTTCATCATCAGACGTTAACTGTAAGGCAATTAGCTACACATAGCAGTGGAATTGACCCTTTTATTCCAAATCGTGATCAGTTGAATGCTACTCAGCTGAAAGATGCCATTAATCATATCAAGGTTTTGGAAGATAAATCGTTTAAATACACTGATATTAATTTTCTTTTACTTGGTTTTATGTTAGAAGAGGTATTAGGGGATAGTTTGGATAAACTTTTCAAACGTTATATTTTCACTCCTTTTCAGATGAAAGAAACCTCTTTTGGTCCTAGAGTAGAAGCTGTTCCAACTGTAGCCGGTATTAACGATGGTATTGTACACGATCCTAAAGCTAAGGTATTAGGAAAGCATACTGGTTCTGCAGGTTTATTTTCAACTATTGATGATTTACAAAGATTTTCTATTCATTATTTAAAAGATGATTTTGCGAAGCCTTTGTGGAATAATTATAGTTTGAGTAAATCAAGATCATTAGCTTGGGATATAGATAAGGATTGGATAAACCATACTGGTTATACTGGTCCTTTTATTGCACTAAATTATCAAAAGCAGGCAGCAGCTATTTTTTTGACAAACAGAACCTTTTCCTATGATGACCGTCCACTTTGGATTAAGAAACGACGACATGTACAAGAGGCGATAACATCGTACTTTGAA

SEQ ID NO: 21550 - protein, 314 aa, Streptococcus agalactiae; identical to SEQ ID NO: 3154

SEQ ID NO: 21551 - protein, 753 aa, Streptococcus agalactiae
ATGACGTTATTTCATTCATTGACATTTAAACACCCAGTATTACGTGTTAATAATAGAGACTTGAATATTGCATTTTATCAGGAGTCTCTTGGATTTAAATTGATAAGTGAAGAAAATGCAATCGCAGTTTTCTCAGCATGGCAGAACAAAGAGGCTAGCTTTATTATTGAGGAATCCCCAACTTATCGTACTCGTGCGGTGAATGGTACTAAGAAGTTAGCAAAGATTATTGTTAAGTCTCAAGATGCAAAAGATATTGAAAAGCTTTTGGCAAATGGTGCGCAAGCCATTCAAGTATATCAAGGTCAAAATGGTTATGCCTATGAAACAGTTTCGCCCGAGGGAGACCTTTTCTTACTTCATGCTGAAGATGATTTGTCACAATTAGTGGCAATTGAGCGCCCAGAGTTAGAAAAAAAAGATGACACTACAGGTCTATCAAACTTTGCTTTCCAATCTATTAGTTTGAATGTACCTGATGCCGTGAAAGCTGAAGCTTTTTACGATAAAGTATTTGCTGGGAAGTTCCCAATTAATTTATCTTTCAAAGAAGCACAGGGACAAGATTTGCAAATTGCTCCAAATGAAACTTGGGATATTGAGATACTAGAATGCTGTGTTAATGAAGATACTAATTTAAATGACTTGAAATCAACTTTTGAATCATTGGGACTTGATGTTTACCTTGATTCTAAAGAAAAGATTTTAGTCATCTCTGACACTAGTAATATTGAGATTTGGATTTCAAAAGAA

SEQ ID NO: 21552 - protein, 251 aa, Streptococcus agalactiae; identical to SEQ ID NO: 3156

SEQ ID NO: 21553 - protein, 644 aa, Streptococcus agalactiae
ATGACAGCTGCACACGTACTTCCAGTTTTGTGCAGTCACTCTGTTTTATTTTTGTTGTAAAAGTAGAGGCTTTAACACTAATAACAATGGCTGGTGCAGCTTTTATTGGGGCTTTTGTTGGAGCTAAAATGACTAAAAATTGGCACGCTCCTACTGTTCAACGTATTCTAGGAACACTGCTCATCACAGCTGCTATTATTATGCTCTATCGTATGATCACTAACCCTGGCGCTGGTATTTCAGATTCAGTGCATGGTCTACACGGCATTTGGTTATTTGTTGGTATCGGCTTCAATTTTATTATTGGTGTATTAATGACTATGGGACTAGGTAATTATGCTCCCGAACTTATCTTCTTCTCCCTAATGGGACTGAGTCCTGCAGTTGCTATGCCTGTCATGATGCTAGATGCAGCTATGATAATGACAGCTTCTAGTACACAATTTATCAAGAGTGGTCGTGTTAATTGGAACGGCTTTGCCGGTCTGGTTACTGGGGGAATATTAGGCGTTATTGTCGCTGTTCTCTTCTTAACTAACCTTGATCTTAACAGCTTGAAAACACTGGTTGTAGGTATTGTTTTATTTACTGGAGCAATGTTAATACGTTCTTCCTTTAAAAAAACTATGCCCAAAAGTCATCAT

SEQ ID NO: 21554 - protein, 215 aa, Streptococcus agalactiae
MTAAHVLPVLLQSLCFIFVVKVEALTLITMAGAAFIGAFVGAKMTKNWHAPTVQRILGTLLITAAIIMLYRMITNPGAGISDSVHGLHGIWLFVGIGFNFIIGVLMTMGLGNYAPELIFFSLMGLSPAVAMPVMMLDAAMIMTASSTQFIKSGRVNWNGFAGLVTGGILGVIVAVLFLTNLDLNSLKTLVVGIVLFTGAMLIRSSFKKTMPKSHH

SEQ ID NO: 21555 - protein, 825 aa, Streptococcus agalactiae
GTGAAGTATATCACAGAATTTATCGCAACCGCTTTTCTTATCATCTTAGGAAATGGGGCTGTAGCTAACGTTGACTTAAAAGGCACAAAAGGAAATAATTCAGGTTGGATTATTATTGCAATTGGTTATGGTTTAGGTGTTATGATGCCAGCGCTTATGTTTGGTAATGTCTCTGGAAACCATATTAACCCAGCTTTCACACTTGGATTGGCATTTTCAGGTCTTTTCCCTTGGGCACACGTTGGACAATACATTCTTGCACAAATTTTGGGAGCAATGTTTGGACAGTTAGTTGTCGTTATGGTTTATCAACCTTACTTTGTTAAGACAGAAAATCCAAATCATGTTCTTGGATCATTTTCAACTATTTCTGCATTAGATGATGGACAGAAATCAAGTCGTAAAGCGGCTTACATTAATGGTTTCTTAAATGAATTCGTTGGTTCTTTTGTTCTTTTCTTTGGAGCTTTGGCTTTAACGAAGAACTATTTTGGTGTAGAACTTGTTGGTAAACTTGTTCAAGCTGGTTATGACCAAACGACAGCAGCGACAAGGATTTCACCATACGTAACTGGTTCACTTGCTGTAGCTCACTTAGGTATTGGTTTCTTGGTAATGACTCTAGTTGCTTCTTTAGGTGGACCGACTGGACCTGCATTGAACCCTGCGCGTGACCTTGGTCCACGTATTGTTCACCGCTTATTACCAAAACAAATTCTTGGACAAGCTAAAGAAGATTCAAAATGGTGGTATGCATGGGTGCCAGTTTTAGCACCAATCGTAGCAAGTATACTCGCTGTAGCCTTGTTCAAACTATTATATCTT

SEQ ID NO: 21556 - protein, 275 aa, Streptococcus agalactiae; identical to SEQ ID NO: 3160

SEQ ID NO: 21557 - protein, 450 aa, Streptococcus agalactiae; identical to SEQ ID NO: 12089

SEQ ID NO: 21558 - protein, 150 aa, Streptococcus agalactiae; identical to SEQ ID NO: 3164

SEQ ID NO: 21559 - protein, 1200 aa, Streptococcus agalactiae
TTGGAAGACAAATTATTCAACAAACATTTTATAGGCATTACTATCTTAAACTTTATTGTTTATATGGTCTATTATTTGTTTACCGTTATCATAGCTTTTATTGCGACTAAAGAGTTAGGTGTTAGCACTAGCCAAGCAGGATTAGCGACGGGGATTTATATTGTAGGGACTTTGATTGCTCGTCTTATATTTGGCAAGCAATTAGAAGTTCTAGGACGTAAGTTAGTTTTACGTGGAGGGGCTATTTTTTACTTACTAACAACTTTAGCTTATTTTTATATGCCAAGTATCGGAGTAATGTATTTAGTTCGTTTCCTAAATGGTTTTGGTTATGGCGTCGTGTCAACAGCAACTAATACTATTGTAACAGCTTATATACCAGCTGATAAAAGAGGTGAGGGGATTAACTTTTACGGTCTATCAACAAGTTTAGCCGCAGCTATTGGTCCTTTTGTAGGAACATTTATGCTAGACAACCTTCATATTAACTTTAAAATGGTTATTGTATTATGTAGTATTTTAATTGCGATTGTAGTGTTGGGAGCATTTGTTTTCCCAGTCAAAAATATTACTTTAAATCCAGAACAGTTAGCTAAATCAAAATCATGGACTATTGATAGTTTCATTGAGAAAAAAGCAATTTTTATCACAATTATTGCATTTTTGATGGGTATCTCCTATGCTTCCGTGTTAGGTTTCCAAAAATTATATACAACAGAAATTAATTTGATGACAGTAGGAGCTTATTTCTTTATTGTTTATGCACTTGTCATCACTTTAACCAGACCATCTATGGGAAGATTAATGGACGCTAAGGGAGATAAGTGGGTGCTTTATCCAAGTTATCTGTTCTTAACTTTGGGACTTGCTTTATTAGGGAGTGCTATGGGAAGTGTTACCTACCTTCTATCAGGTGCTTTGATTGGTTTTGGTTATGGTACCTTTATGTCTTGTGGCCAAGCAGCATCAATCAAAGGTGTTGAGGAACATCGTTTCAATACAGCCATGTCAACTTACATGATAGGTCTTGATTTAGGGTTAGGTGCTGGACCTTACATTTTGGGACTTGTTAAAGATGGTTTTCTTGGAGCTGGTGTGCAATCCTTTAGAGAATTATTCTGGATAGCAGCGATTATTCCTGTTGTTTGTGGTATTCTATATTTCTTAAAATCATCTAGACAAGTTGAAACTAAAACTATA

SEQ ID NO: 21560 - protein, 400 aa, Streptococcus agalactiae; identical to SEQ ID NO: 7876

SEQ ID NO: 21561 - protein, 656 aa, Streptococcus agalactiae
ATGAATCATCAAATTTTACAAAATTACATTAATAGTCATAATCTTCCAATTATCGAAAAAGACTACCATAAATACCTTACATTTGAAAGTTTAGAAGAAGACTATACTTATATCCTAAAAGATGGTATTGTTAAACAAAGTGTTCTCTCTAAATATGGTACTGAGTTCAATCTGCGTTATGTGACAGGCTTAGAAATCACTTCTATCCTAAATACAGACTACTCCCAACACATGGGAGAACCTTACAACGTTCGAATCGAATCCGAAACTGCCCACTTTTACAAAGTACGTCGCTCTACCTTCCTAAAAGATATCAATAATGATATTGAACTGCAAGGATATGTGAAAGATTTCTATCATAACCGCCTTGAAAAATCTATGAAAAAAATGCAATGTATGCTCACTAATGGTCGAATTGGTGCTATCTCCACACAATTATATGACCTCAGTAAGATGTTTGGTGAAGAACGAGATAACGGGATATCTATATTAATTTTGTTATCACGAACGAAGAACTTGGTAAATTTTGCGGTATATCCACAGGAAGTAGCGTGAGCCGCATTTTGAAACAACTAAAAGACGATCATATTATTCGTATTGAAAAACAACATATCATTATTACAAATGTTGAGAAATTAAAAGATCATATTGTATTT

SEQ ID NO: 21562 - protein, 219 aa, Streptococcus agalactiae; identical to SEQ ID NO: 3170

SEQ ID NO: 21563 - protein, 2282 aa, Streptococcus agalactiae
ATGCGTTATAATCAATTCAGCTACATTCCAACTAAACCTAACGAAGCTTTTGAAGAGCTAAAAGGACTAGGTTTTCCATTAAACAAAAAGAATTCTGATAAAGCTAATTTGGAAGCTTTTCTCAGACATTCTTTTTTAAATCAAACTGATACTGATTACGCTCTTAGTCTCCTTATCGTTGATGCAAAAACCGATGCTCTAACCTTTTTTAAATCAAATAGTGACTTAACACTAGAAAATTTACAATGGATTTATTTACAGTTATTAGGCTTTGTCCCCTTTGTAGACTTTAAAGACCCTAAAGCTTTCTTACAAGATATTAACTTCCCAGTCTCATATGACAATATTTTTCAAAGTCTACATCACTTACTCGCCTGTCGTGGAAAATCTGGCAATACATTAATCGACCAATTAGTTGCTGATGGTTTACTTCATGCAGATAATCACTACCATTTTTTCAATGGGAAGTCTCTGGCCACTTTCAATACTAACCAATTGATTCGCGAAGTTGTCTATGTTGAAACATCCTTAGATACTATGTCTAGTGGTGAACATGATTTAGTAAAAGTTAACATTATCAGACCCACTACCGAGCATACTATCCCCACGATGATGACAGCTAGCCCCTATCATCAAGGTATCAATGATCCTGCCGCAGACCAAAAAACATACCAAATGGAGGGTGCGCTAGCAGTTAAACAGCCTAAACACATACAAGTTGACACAAAACCATTTAAAGAAGAAGTAAAACATCCTTCAAAATTACCCATCAGCCCTGCAACTGAAAGCTTCACACACATTGACAGTTATAGTCTCAATGACTATTTTCTTTCTCGTGGTTTTGCTAATATATACGTTTCAGGTGTGGGTACTGCTGGCTCTACGGGTTTCATGACCAGTGGGGATTACCAACAAATACAAAGCTTTAAAGCAGTCATTGATTGGTTAAATGGTAAGGTTACTGCATTCACAAGTCATAAACGAGATAAACAAGTCAAGGCTGATTGGTCAAATGGCCTTGTAGCAACCACAGGTAAATCTTATCTCGGTACCATGTCAACTGGTTTAGCAACAACTGGCGTTGAGGGGCTGAAAGTCATTATCGCTGAAGCCGCAATCTCCACATGGTATGATTATTATCGAGAAAATGGGCTTGTGTGTAGTCCAGGCGGCTACCCCGGTGAAGATTTAGACGTTTTAACAGAATTAACATACTCACGAAACCTCTTAGCTGGTGATTACATCAAAAACAACGATTGCTATCAAGCATTGTTAAATGAACAATCAAAAGCAATTGACCGTCAAAGTGGGGATTACAACCAATACTGGCATGACCGTAATTACCTAACTCACGTCAATAATGTCAAAAGTCGAGTAGTTTACACTCATGGACTACAGGATTGGAATGTTAAGCCAAGACATGTCTACAAAATTTTCAATGCATTGCCTCAAACCATCAAAAAACACCTTTTTTTACATCAAGGTCAACATGTGTATATGCATAATTGGCAGTCGATTGATTTTCGTGAAAGCATGAATGCCTTACTAAGCCAAGAACTACTTGGCATTGACAATCATTTCCAATTAGAAGAGGTCATTTGGCAAGATAATACTACTGAGCAAACTTGGCAAGTTTTAGATGCTTTCGGAGGAAACCATCAAGAGCAAATTGGCTTAGGTGATAGTAAAAAACTTATTGATAACCATTATGACAAAGAAGCCTTTGATACTTATTGTAAAGACTTCAATGTGTTCAAAAATGATCTTTTCAAGGGAAATAATAAAACCAATCAAATCACTATTAATCTTCCTCTAAAGAAAAATTATCTCCTGAATGGACAGTGCAAACTCCATCTACGTGTTAAAACTAGTGACAAAAAGGCCATTTTATCAGCCCAAATCTTAGACTATGTCCTAAAAAACGATTCAAAGATACACCAACCATCAAATTCTTAAACAGCCTTGATAATGGTAAAAATTTTGCCAGAGAAGCTTTACGTGAACTCCCGTTTACTAAAGATCATTATCGTGTCATCAGTAAAGGTGTCTTGAACCTTCAAAATCGTACAGACTTACTTACAATTGAGGCTATCGATCCAGAACAATGGTTTGATATCGAGTTTAGCCTCCAACCAAGTATATATCAATTGAGTAAAGGTGATAATCTAAGGATTATCCTTTATACAACTGATTTTGAACATACCATTCGAGATAATGCTAGTTACTCTATAACAGTAGATTTGAGTCAATCTTATTTAACTATCCCAACTAATCAAGGAAAT

SEQ ID NO: 21564 - protein, 761 aa, Streptococcus agalactiae; identical to SEQ ID NO: 12098

SEQ ID NO: 21565 - protein, 357 aa, Streptococcus agalactiae; identical to SEQ ID NO: 12099

SEQ ID NO: 21566 - protein, 119 aa, Streptococcus agalactiae; identical to SEQ ID NO: 12100

SEQ ID NO: 21567 - protein, 978 aa, Streptococcus agalactiae; identical to SEQ ID NO: 12101

SEQ ID NO: 21568 - protein, 326 aa, Streptococcus agalactiae; identical to SEQ ID NO: 12102

SEQ ID NO: 21569 - protein, 1746 aa, Streptococcus agalactiae
ATGTTTAAAATCCCTTTGTTTAAAGAATTAAAGACAGATCAATGGGTAAAACCATTTTTCAAACAATATAAAGTTTCCTTAGTAATTGCTCTTTTCCTTGGTTTTATGACTTTCTTTTCTGCCAGTGCTCTTATGTTTAATTCGGGCTATCTGATTAGTAAGTCAGCTTCACTACCGAGTAATATTCTTCTAGTGTATGTTCCAATTGTACTAACACGTGCTTTTGGTATTGGACGTCCTGTTTTTCGTTATATAGAACGCCTAACGAGTCACAATTGGGTATTACGAATGACTTCACAACTGCGCTTGAAGCTTTACCATTCCTTAGAAAGCAATGCTATCTTTATGAAGCGTGATTTTCGTTTAGGAGATGTTATGGGGCTTTTAGCGGAGGATATTAATTATTTGCAAAATTTGTATCTTAGGACAATATTTCCAACGATTATAGGGTGGTTATTATATAGCTTTATTATTATTGCAACAGGCTTCTTTTCTCTATGGTTCGCTTTAATGATGTTGCTTTATTTAGCTATTATGATTTTTGTTTTTCCACTTTGGTCGATTTTAGCTAATGGTGCTCGTCAGACTCGTGAAAAAGAATTAAAAAATCATCTTTATACTGATTTGACGGATAATGTCTTAGGTATTTCAGACTGGATTTTTAGTCAACGTGGTCAAGAGTACGTCGCCTTGCATGAGCGTTCGGAAAGTGAACTCATGGCTGTTCAGAAAAAAATTCGTTCCTTTGATAATCGTAGAGCTCTTATTGTGGAATTAGTTTTTGGCTTTCTAGCTATTTTGGTTATTATTTGGGCTAGTAATCAGTTTATTGGTCACAGAGGTGGCGAAGCTAACTGGATTGCAGCATTTGTTCTAACAGTATTTCCCTTGTCAGAGGCATTTGCTGGTTTGTCTGCTGCTGCTCAAGAAACAAATAAATATTCTGATTCAATTCATCGTCTTAATGAATTATCAGAAACGTATTTTGAAACAACTCAAAATCAATTGCCTAATAAGCCATATGATTTTTCCGTCAAGAATTTAAGTTTCCAGTATAAGCCACAAGAGAAATGGGTTTTGCATCATTTAGATTTGGATATTAAAGAAGGAGAAAAAATTGCTATTTTAGGGCGTAGTGGTTCTGGCAAGAGTACCTTAGCTAGTCTACTTCGTGGCGACTTGAAAGCAAGTCAAGGGGAGATTACCCTAGGCGGTGCTGATGTTTCAATAGTTGGTGATTGCATTTCTAACTATATTGGAGTGATACAACAAGCGCCCTACCTTTTTAATACAACGCTGCTAAATAACATTCGCATTGGAAACCAAGATGCTAGTGAAGAAGATGTATGGAAAGTTCTTGAACGAGTTGGATTGAAAGAGATGGTCACTGATTTATCAGATGGTCTCTATACAATGGTTGATGAAGCTGGACTTAGGTTTTCAGGTGGCGAAAGGCATAGAATTGCTTTGGCTAGAATCTTACTAAAAGATGTCCCAATTGTTATCTTAGATGAGCCAACTGTTGGACTTGATCCTATTACTGAACAAGCCTTACTAAGGGTATTTATGAAAGAATTGGAAGGTAAGACCTTAGTTTGGATTACACATCACTTAAAAGGTATTGAACATGCTGATCGTATCTTATTTATAGAAAATGGGCAATTAGAGTTGGAAGGTTCTCCTCAAGAATTGTCTCAAAGTAGCCAACGTTACCGTCAGCTGAAAGCCGCTGATGATGGTGATCTA

SEQ ID NO: 21570 - protein, 582 aa, Streptococcus agalactiae
MFKIPLFKELKTDQWVKPFFKQYKVSLVIALFLGFMTFFSASALMFNSGYLISKSASLPSNILLVYVPIVLTRAFGIGRPVFRYIERLTSHNWVLRMTSQLRLKLYHSLESNAIFMKRDFRLGDVMGLLAEDINYLQNLYLRTIFPTIIGWLLYSFIIIATGFFSLWFALMMLLYLAIMIFVFPLWSILANGARQTREKELKNHLYTDLTDNVLGISDWIFSQRGQEYVALHERSESELMAVQKKIRSFDNRRALIVELVFGFLAILVIIWASNQFIGHRGGEANWIAAFVLTVFPLSEAFAGLSAAAQETNKYSDSIHRLNELSETYFETTQNQLPNKPYDFSVKNLSFQYKPQEKWVLHHLDLDIKEGEKIAILGRSGSGKSTLASLLRGDLKASQGEITLGGADVSIVGDCISNYIGVIQQAPYLFNTTLLNNIRIGNQDASEEDVWKVLERVGLKEMVTDLSDGLYTMVDEAGLRFSGGERHRIALARILLKDVPIVILDEPTVGLDPITEQALLRVFMKELEGKTLVWITHHLKGIEHADRILFIENGQLELEGSPQELSQSSQRYRQLKAADDGDL

SEQ ID NO: 21571 - protein, 546 aa, Streptococcus agalactiae
ATGGGGGTAGAGAAGTGGTAACCTTGATCAAGAAGATTGGCATAAACAGAGATCTATATTCCTCAAACTCCTTATGTTTTTGAAATGTCATTACGTGATAATATTACCTTCTATACTCCCAATGCTAGTGACGAAGAGGTGATAAGAGCGATTCATATGGTAGGTTTAGATAGCTTACTAAGCGAGTTACCCGATGGTTTAGAAACGCGTATTGGTAATGGAGCGCGTCCACTTAGTGGAGGACAAGCCCAGCGTATAGCTCTGGCTCGTGCTTTTCTTGATCAAAATCGTCGTATTATGGTTTTTGATGAACCAACTGCTCATTTAGATATTGAAACAGAGTTAGAATTAAAAGAGAAAATGTTGCCACTGATGTCAGATCGTTTAGTTATCTTTGCAACTCATCGTCTTCACTGGTTGAACCAAATGGATGTTATAGTCGTTATGGAGAAGGGGAGAGTTGCAGAAGTAGGCTCTTATCAGGAATTATTAGCTAAAAAAGGATATCTCTATCAACTGAAGCATGCTATGGGAGGAAATAATGTT

SEQ ID NO: 21572 - protein, 183 aa, Streptococcus agalactiae
MGVEKWLTLIKKDWHKQMIYIPQTPYVFEMSLRDNITFYTPNASDEEVIRAIHMVGLDSLLSELPDGLETRIGNGARPLSGGQAQRIALARAFLDQNRRIMVFDEPTAHLDIETELELKEKMLPLMSDRLVIFATHRLHWLNQMDVIVVMEKGRVAEVGSYQELLAKKGYLYQLKHAMGGNNV

SEQ ID NO: 21573 - protein, 420 aa, Streptococcus agalactiae
ATGAAGAGTATGAATAACAAGATTTTAGAACAGTTAGAATTTAACAAAGTTAAGGAATTGATATTACCTTATCTCAAGACAGAACAATCACAAGAAGAATTATCAGAGCTGGAGCCGATGACGGAGGCTCCTAAAATAGAAAAAAGTTTTAATGAAATTTCTGACATGGAACAGATTTTTGTTGAACATCACTCATTTGGCATAGTCAGCCTAAGTTCAATCTCTGAGAGTTTAAAACGCTTAGAGCTTTCAGCTGATCTTAATATTCAAGAACTTTTGGCTATCAAAAAAGTTTTACAGAGTTCTTCGGATATGATTCACTTTTATTCTGATTTGGATAATGTTTCTTTCCAATCTTTGGATCGTTTGTTTGAAAATTTGGAACAATTCCCTAATCTGGCAGGGTCTTTTCAGCTATCA

SEQ ID NO: 21574 - protein, 141 aa, Streptococcus agalactiae
MKSMNNKILEQLEFNKVKELILPYLKTEQSQEELSELEPMTEAPKIEKSFNEISDMEQIFVEHHSFGIVSLSSISESLKRLELSADLNIQELLAIKKVLQSSSDMIHFYSDLDNVSFQSLDRLFENLEQFPNLARVFSSYP

SEQ ID NO: 21575 - protein, 1637 aa, Streptococcus agalactiae
ATGCTAGATAAAGCGGTTATGCGCTTGTCAGGTATTCATAAGTTGTTAGGATTGCTTGCGGGACTTGATGTTCTTCAAGCAATCTTTATTATCGGACAAGCTTATTATTTGAGTCTTTCTATAACTGGTTTGTGGGAAGGGCAAAAACTTTCTTCTCAAACGGTTTATATTTTGTTATTTATGGTCTCATATTTAGGCCGTCATGTTATTGATTACATCAAAAATAGAAAACTTGATGACTTTTCAACAGCACAATCTAGTCTTTTGAGACGTCAATTATTAGATAAGTTATTTGATCTAGGTCCTAAAGTCGTTCAAGAACAAGGAACTGGTAATGTTGTTACAATGGCATTAGATGGCGTTTCTTTAGTTGAAAATTATTTACGTTTAGTCTTGAATAAGATGATTAACATGTCTATTATCCCATGGATTATTCTAGCTTATATTTTCTATTTAGATATTGAATCAGGTGCAATTTTACTTATCGTTTTTCCTTTAATTATCATCTTTATGATTATTTTAGGCTATGCGGCTCAAGCTAAAGCAGATAAACAATATGAATCCTATCAAGTACTTTCTAATCATTTTTTAGATTCATTACGAGGCATTGATACTCTCAAATATTTTGGTCTTAGTAAACGTTATGGTAAAAGCATTTATCAAACTAGTGAATCTTTTCGTAAAGCAACAATGAGTACTTTGAAAATTGGTATTTTATCAACGTTTGCTTTAGACTTTTTTACAACTTTATCCATTGCTATCGTTGCTGTTTTTCTAGGTTTACGATTATTAAATGAGCAGATTTACCTTTTACCGGCTTTAACAATTTTGATTTTATCCCCTGAATACTTTTTACCCGTAAGAGATTTTTCTAGTGATTATCATGCAACGTTAGACGGGAAAAATGCATTTCAAGCGATTCAAAAAGTTCTAAACAAAACTGGTATTAAAGGTGAGCAATTAGTCATAGATGATTGGTCTAAAGAGAGTCATTTGGATTTAGAAAACATTGCTATTGCGTACGACCAAAAACGTGTTGTTGAGGATGTAACCTTACGATTTAGAGGACATCAAAAGGTTGCTTTAGTAGGAGTTAGTGGTTCAGGTAAGTCTAGCTTAATTAACCTTCTGAGTGGTTTTTTAGGGCCTGATAAAGGTTCTTTAAAAGTGGATGGTAGAGAAGTGGTTAACCTTGATCAAGAAGATTGGCATAAACAGATGATCTATATTCCTCAAACTCCTTATGTTTTTGAAATGTCATTACGTGATAATATTACCTTCTATACTCCCAATGCTAGTGACGAAGAGGTGATAAGAGCGATTCATATGGTAGGTTTAGATAGCTTACTAAGCGAGTTACCCGATGGTTTAGAAACGCGTATTGGTAATGGAGCGCGTCCACTTAGTGGAGGACAAGCCCAGCGTATAGCTCTGGCTCGTGCTTTTCTTGATCAAAATCGTCGTATTATGGTTTTTGATGAACCAACTGCTCATTTAGATATTGAAACAGAGTTAGAATTAAAAGAGAAAATGTTGCCACTGATGTCAGATCGTTTAGTTATCTTTGCAACTCATCGTCTTCACTGGTTGAACCAAATGGATGTTATAGTCGTTATGGAGAAGGGGAGATGCAGAAG

SEQ ID NO: 21576 - protein, 546 aa, Streptococcus agalactiae
MLDKAVMRLSGIHKLLGLLAGLDVLQAIFIIGQAYYLSLSITGLWEGQKLSSQTVYILLFMVSYLGRHVIDYIKNRKLDDFSTAQSSLLRRQLLDKLFDLGPKVVQEQGTGNVVTMALDGVSLVENYLRLVLNKMINMSIIPWIILAYIFYLDIESGAILLIVFPLIIIFMIILGYAAQAKADKQYESYQVLSNHFLDSLRGIDTLKYFGLSKRYGKSIYQTSESFRKATMSTLKIGILSTFALDFFTTLSIAIVAVFLGLRLLNEQIYLLPALTILILSPEYFLPVRDFSSDYHATLDGKNAFQAIQKVLNKTGIKGEQLVIDDWSKESHLDLENIAIAYDQKRVVEDVTLRFRGHQKVALVGVSGSGKSSLINLLSGFLGPDKGSLKVDGREVVNLDQEDWHKQMIYIPQTPYVFEMSLRDNITFYTPNASDEEVIRAIHMVGLDSLLSELPDGLETRIGNGARPLSGGQAQRIALARAFLDQNRRIMVFDEPTAHLDIETELELKEKMLPLMSDRLVIFATHRLHWLNQMDVIVVMEKGRVQK

SEQ ID NO: 21577 - protein, 1017 aa, Streptococcus agalactiae; identical to SEQ ID NO: 12107

SEQ ID NO: 21578 - protein, 339 aa, Streptococcus agalactiae; identical to SEQ ID NO: 3184

SEQ ID NO: 21579 - protein, 1425 aa, Streptococcus agalactiae; identical to SEQ ID NO: 12109

SEQ ID NO: 21580 - protein, 475 aa, Streptococcus agalactiae; identical to SEQ ID NO: 7900

SEQ ID NO: 21581 - protein, 1206 aa, Streptococcus agalactiae
ATGAAAGAAATCCTAGTTTTAGGTGCTGGTTATGCCGGTTTGAAAGCAGTTCGTAATTTACAAAAACAATCAGGTGATTTTCATATTACCCTTGTTGACATGAATGATTATCACTACGAAGCTACAGAATTACATGAAGTAGCTGCAGGATCTCAGCCAAAAGAAAAAATTACATTCCCAATTAGGGATGTTATCAACACTAATAAGGTTAACTTCATGCAAGATGAGGTGCTTAGAGTCGATGCTGAAAATAAAACAGTAACAGTTAAAAATAACGGTGAACTCCATTATGATTATGTCGTAGTTGCCTTAGGCTTTGTATCTGAAACTTTTGGCATCAAGGGTGCTATGGAGAATGCTTTGCAGATGACCAATATTTCGCAAGCAGAAAACATCCATAATCACATTGTTAATACAATGAAGTTGTATCGTGAGACAAAAGATGAAAATCTTCTCAAACTCTTAGTATGTGGTGCTGGTTTTACAGGTATTGAGTTAGCCGGAGCTATGGTTGATGAGCGACCAAAATATGCTGCTTTAGCGGGTGTAAAACCTGAACAAATTGAAATTATTTGTGTAGAGGCAGCAACTCGCATCCTACCAATGTTTGATGATGAATTAGCGCAATATGGTGTCAACTTAATTAAGGATTTAGGTATTAATTTGATGCTTGGAAGTATGATTAAGGAAATCAAACCGGGTGAAGTTGTTTATGGTACTAGTAAAGAGGATGAAGAACTCAAATCTATTACCGCAGGTACTATCATTTGGACAACAGGTGTTAGTGGAAGTCCGGTTATGGGAGAATCAGGATTTGATCAACGTCGTGGACGTGTAATGGTCAACAGTGATTTGCGTGATCCAAAATATGATAATGTTTATGTTATCGGTGATGTGTCTGCATTTATGGACACTGAGTCTGGTCGCCCATTCCCAACAACAGCTCAAATTGCAACTCGTATGGGAGCTCATGTTGCTAAAAACCTTTTACATCAAATCAAAGGTGAAGCCATAGAAGACTTTTCGTATAGTCCGCAAGGCACAGTTGCTTCAGTAGGAAATACGCATGGACTTGGTGTTGTTGGAAAAACTAAAATTAAAAAATACCCTGCATCGGTTATGAAGAAGATTATCATGAACAAATCACTTGTTGATATGGGTGGACTTAAAGAACTTCTAGCTAAGGGACGTTTTGATTTATATCAT

SEQ ID NO: 21582 - protein, 402 aa, Streptococcus agalactiae
MKEILVLGAGYAGLKAVRNLQKQSGDFHITLVDMNDYHYEATELHEVAAGSQPKEKITFPIRDVINTNKVNFMQDEVLRVDAENKTVTVKNNGELHYDYVVVALGFVSETFGIKGAMENALQMTNISQAENIHNHIVNTMKLYRETKDENLLKLLVCGAGFTGIELAGAMVDERPKYAALAGVKPEQIEIICVEAATRILPMFDDELAQYGVNLIKDLGINLMLGSMIKEIKPGEVVYGTSKEDEELKSITAGTIIWTTGVSGSPVMGESGFDQRRGRVMVNSDLRDPKYDNVYVIGDVSAFMDTESGRPFPTTAQIATRMGAHVAKNLLHQIKGEAIEDFSYSPQGTVASVGNTHGLGVVGKTKIKKYPASVMKKIIMNKSLVDMGGLKELLAKGRFDLYH

SEQ ID NO: 21583 - protein, 897 aa, Streptococcus agalactiae; identical to SEQ ID NO: 12113

SEQ ID NO: 21584 - protein, 299 aa, Streptococcus agalactiae; identical to SEQ ID NO: 12114

SEQ ID NO: 21585 - protein, 762 aa, Streptococcus agalactiae
ATGAAAAAACTTATTACAGAAAAAAAAGTCAACAACGTCTCAACTGCTAACTATTTGAAACTCGGTCTTGTCTCAGCAATGTTTGCTGGAGGAGCATTCGTAGCTCTTGGTTCTACACAAGGTGTTTCAGCTTCAACTTTCACAGCACCGCAAGCAACACCTCCAAAAGCAGAACGTCAGTTAACAGATGCAGAACTTTATGAACGTGCCCAAAAACAAGTATTGCCAAAATATATCCAAGGTTCTCTTTCAGGTATTCTCAACCAACATTCAACACTTTACAAACAACAAAACGCAGCAGCGACACCGCAAGTATCAACCCCTAAATCAGAACGTCAGTTAACAGATTCAGAAATCTATGAACGTGCCCAAAAACAAGTATTGCCAAAATATATCCAAGGTTCTCTCTCAGGTATCCTTAACCAACATTCAACACTTTACAAACAACAAAACGCAGCAGTGACACCGCAAGTATCAAGCCCCAAAGCAGAACGTCAGTTAACAGATTCAGAAATCTATGAACGTGCCCAAAAACAAGTATTACCAAAATATATCCAAGGTTCTCTTTCAGGTATTCTCAACCAACATTCAACACTTTACAAACAACAAAACGCAGCAGTGACACCGCAAGTATCAAGCCCCAAAGCAGAACGTCAGTTAACAGATTCAGAAATCTATGAACGTGCCCAAAAACAAGTATTACCAAAATATATCCAAGGTTCTCTCTCAGGTATCCTTAACCAGCATTCAACTTTAAATGTT

SEQ ID NO: 21586 - protein, 254 aa, Streptococcus agalactiae
MKKLITEKKVNNVSTANYLKLGLVSAMFAGGAFVALGSTQGVSASTFTAPQATPPKAERQLTDAELYERAQKQVLPKYIQGSLSGILNQHSTLYKQQNAAATPQVSTPKSERQLTDSEIYERAQKQVLPKYIQGSLSGILNQHSTLYKQQNAAVTPQVSSPKAERQLTDSEIYERAQKQVLPKYIQGSLSGILNQHSTLYKQQNAAVTPQVSSPKAERQLTDSEIYERAQKQVLPKYIQGSLSGILNQHSTLNV

SEQ ID NO: 21587 - protein, 1578 aa, Streptococcus agalactiae; identical to SEQ ID NO: 12117

SEQ ID NO: 21588 - protein, 526 aa, Streptococcus agalactiae; identical to SEQ ID NO: 12118

SEQ ID NO: 21589 - protein, 1770 aa, Streptococcus agalactiae; identical to SEQ ID NO: 12119

SEQ ID NO: 21590 - protein, 590 aa, Streptococcus agalactiae; identical to SEQ ID NO: 12120

SEQ ID NO: 21591 - protein, 219 aa, Streptococcus agalactiae
TTGCTTTTTGATTATTTTTATAATGCTTTATATAGGACTGTAGCATTTTCTGTTGTGAAACCATATTCTTCAAAGATACGATTTCCTGGTGCCGAAGCTCCCCATGTGTCAATGGTTAAGGTTTTGCCAGCTAAGCCTACATATTTTGCCCAACCAAAGCTTGATGCTGCTTCAATTGCCAAGCGTTTTGTGATTGTGGCTGGTAAAATCTCTTCTTTA

SEQ ID NO: 21592 - protein, 73 aa, Streptococcus agalactiae
MLFDYFYNALYRTVAFSVVKPYSSKIRFPGAEAPHVSMVKVLPAKPTYFAQPKLDAASIAKRFVIVAGKISSL

SEQ ID NO: 21593 - protein, 1756 aa, Streptococcus agalactiae
ATGCTATACAGCTTATTACATTTAGCTGGTTACGACCTTTCAATCGATGATTGAAAATTTCGTAATGGGGTCAAAAACGCCAGGACATCCTGAAGTCAATCATACAGATGTGTAGAAGCACACAGGACCGCTAGGACAAGGTATCGCAAACGCTGTAGGTATGGCAATGGCAGAAGCTCACCTTGCTGCAAAATACAACAAACCAGGTTTCAATATCGTTGACCATTATACTTTTGCTTTAAATGGTGATGGTGACTTAATGGAAGGTGTCAGTCAAGAAGTCGCAAGTTTAGCAGGTCACTTAAAACTTGGAAAATTAATCACTTTATATGATTCAAATGACATTTCTCTAGATGGCCCTACATCTATGGCCTTCACTGAGGATGTTAAAGGACGTTTTGAAGCTTATGGATGGCAACATATCCTCGTTAAAGACGGCAATGACTTAGATGCTATTGCCAAAGCTATCGAAGAGGCAAAAGCTGAAACTGAAAAACCAACTATTATTGAAGTTAAAACAATTATTGTTTTTGGATCTGAAAAACAAGGAACTTCAGCAGTTCATGGTGCCCCACTTGGAGCAGAAGGCATTGTCTTTACTAAAAATGCTTACAAATGGACCTATGAAGATTTCATCGTTCCTGACGAAGTGAAAGCTCGTTTCCAAGAAGGATTACAAGCACGTGGTGAACAAGCTGAAAATGCTTGGAATGAACTCTTTGCAAAATATGAAGCGGAATATCCAGAACTTGCTAAAGGCTATAAAGAAGTCTTTTCAAATGAACCAGTTTCAGTAGAATTAGCTGCGCATGAACTTGGGTCATCAAAAGCTAGCCGTGTTTCAAGTCAAGAGGCTATCCAACAAATCTCTGAACAAGTCGCATCATTCTGGGGTGGTTCGGCAGACCTTTCAGCCTCAAACAACACAATGGTTAAAGTTGAAAAAGACTTCCAACCAGGTCAATATGAAGGCTGCAATATCTGGTTTGGTGTACGTGAATTTGCCATGGCAGCTGCGATGAACGGTATTGCTCTTCATGGTGGTACTCGCGTTTATGGTGGTACATTCTTCGTCTTCTCAAACTATCTATTACCTGCAGTACGTATGGCAGCACTGCAAAGCTTACCAACCATGTATGTCATGACACATGACTCCATTGCCGTTGGTGAAGACGGTCCAACTCATGAACCAATTGAACAGTTAGCAAGTGTCCGTTCAATGCCAAACTTGAACGTCATTCGTCCAGCGGATGGTAATGAAACCAATGCCGCATGGAAACATGCCTTAGCAGAAATAGATAAACCAACAATGCTAGTGTTAACACGACAAAACTTGCCAGTTCTTGAAGGAACAAAAGAATTAGCAGAAGAAGGTTTAAATAAGGGTGCTTATATCTTGTCAGAAGCCAAAGGCGAAATGGATGGTATCATCATTGCGACGGGATCTGAAGTAAAATTAGCCATGGATACACAGGCTGCGCTAGCAGAAGAAGGGATCCATGTTCGTGTTGTATCAATGCCATCACAAAATATCTTTGATGCGCAAAGCGACGCTTATAAAGAAGAGATTTTACCAGCCACAATCACAAAACGCTTGGCAATTGAAGCAGCATCAAGCTTTGGTTGGGCAAAATATGTAGGCTTAGCTGGCAAAACCTTAACCATTGACACATGGGGAGCTTCGGCACCAGGAAATCGTATCTTTGAAGAATATGGTTTCACAACAGAAAATGCTACAGTCCTATATAAAGCATTA

SEQ ID NO: 21594 - protein, 588 aa, Streptococcus agalactiae
  VARIANT 43, 44: Xaa = Any Amino Acid
MLYSLLHLAGYDLSIDDLKNFRQWGSKTPGHPEVNHTDGVEAXXGPLGQGIANAVGMAMAEAHLAAKYNKPGFNIVDHYTFALNGDGDLMEGVSQEVASLAGHLKLGKLITLYDSNDISLDGPTSMAFTEDVKGRFEAYGWQHILVKDGNDLDAIAKAIEEAKAETEKPTIIEVKTIIVFGSEKQGTSAVHGAPLGAEGIVFTKNAYKWTYEDFIVPDEVKARFQEGLQARGEQAENAWNELFAKYEAEYPELAKGYKEVFSNEPVSVELAAHELGSSKASRVSSQEAIQQISEQVASFWGGSADLSASNNTMVKVEKDFQPGQYEGCNIWFGVREFAMAAAMNGIALHGGTRVYGGTFFVFSNYLLPAVRMAALQSLPTMYVMTHDSIAVGEDGPTHEPIEQLASVRSMPNLNVIRPADGNETNAAWKHALAEIDKPTMLVLTRQNLPVLEGTKELAEEGLNKGAYILSEAKGEMDGIIIATGSEVKLAMDTQAALAEEGIHVRVVSMPSQNIFDAQSDAYKEEILPATITKRLAIEAASSFGWAKYVGLAGKTLTIDTWGASAPGNRIFEEYGFTTENATVLYKAL

SEQ ID NO: 21595 - protein, 495 aa, Streptococcus agalactiae
ATGGATACAGCTAATAAAGAATTGGTTGCTAAGTATGGTAAAGATAACTACTACCCAATGGTTAACCTACTTTTCTATGGTTTCCGTACAATGGCGGCGATGGGAACAGCTATTATGGGTGTTTCTGTTTTAGGCCTCTTTTTAACTCGTAAGAAAAAACCAATTCTTTATAAACACAAATGGATGCTTTGGATTGTTGCTTTAACAACCTTTGCACCATTCTTAGCCAATACATTTGGTTGGATTGTGACAGAACAAGGACGATACCCTTGGACTGTCTATGGTCTTTTCAAGATTAAGGACTCTGTCTCTCCAAACGTTTCAGTTGCATCATTATTTGTTTCCAATACTGTGTACTTCTTGTTGTTTGGTGGTTTAGCGGTGATGATGATAAGCCTAACAATAAGAGAATTGAAGAAAGGGCCAGAGTATGAAGATGAACATGGACATCATGGTGCATATACTTCAATTGATCCCTTTGAGAAAGGAGCATAC

SEQ ID NO: 21596 - protein, 165 aa, Streptococcus agalactiae
MDTANKELVAKYGKDNYYPMVNLLFYGFRTMAAMGTAIMGVSVLGLFLTRKKKPILYKHKWMLWIVALTTFAPFLANTFGWIVTEQGRYPWTVYGLFKIKDSVSPNVSVASLFVSNTVYFLLFGGLAVMMISLTIRELKKGPEYEDEHGHHGAYTSIDPFEKGAY

SEQ ID NO: 21597 - protein, 159 aa, Streptococcus agalactiae
ATGAAAATTGCTGCTATGGAAGGTGATTATGAAGATTCGGGTGATCCTGCAGCTTGGAGTGTAGTTGCTTGGCAAATGAAAGCAGACACAAACCAAGTTTTTGGGATCAAGATTCCCTATATGTGGAGTATTTATTTTACGGAAAACCATCTGGTTCTG

SEQ ID NO: 21598 - protein, 53 aa, Streptococcus agalactiae
MKIAAMEGDYEDSGDPAAWSVVAWQMKADTNQVFGIKIPYMWSIYFTENHLVL

SEQ ID NO: 21599 - protein, 397 aa, Streptococcus agalactiae
ATGTGGGCTTATGATAAGAGTTTTACTGATCAAGATTGTCAGTACTGGTTAGATTGGAATATGAATTCTTACAGGTCTGATGGATTTGGTCTGTGGAAAATCATTCATAAAGAAACTTCAGAGGTCGTAGGTGAATGTGGCATTACAATGCAAACTGTTGAAGGAGAAAATTACCCTGAAATAGGTTACCATCTTAAAAAAGAGCATTGGAATAAAGGAATTGCGACAGAAGTTGCTAGGGCAGTACGAGATTATGCTTTCGAAGAGTTAAACCTTGAGGAACTCATTATCATAAGTCGAGATATTAATTTACAGTCAATGAATATTGCCATAAAATCAGGATTTACTATTAAAAAAAGATTTTTGAAGAATGATGGTTCCTCATTTTATGTTTTAC

SEQ ID NO: 21600 - protein, 133 aa, Streptococcus agalactiae
MWAYDKSFTDQDCQYWLDWNMNSYRSDGFGLWKIIHKETSEVVGECGITMQTVEGENYPEIGYHLKKEHWNKGIATEVARAVRDYAFEELNLEELIIISRDINLQSMNIAIKSGFTIKKRFLKNDRFPHFMFY

SEQ ID NO: 21601 - protein, 297 aa, Streptococcus agalactiae; identical to SEQ ID NO: 12151

SEQ ID NO: 21602 - protein, 99 aa, Streptococcus agalactiae; identical to SEQ ID NO: 3196

SEQ ID NO: 21603 - protein, 1188 aa, Streptococcus agalactiae
ATGGTTATGGATAGTCTGATCATAAAACAGTTGATTAAGAGTACATTTGATATACCCTTACAAGTCACTTATCCAAATGGGAATATTGAAACTTATAATGGTAACAATCCCCACGTCAAACTTAAACTAAACAAAAATTTCTCCGTCTCGGAGCTATCAAAAGACCCTTCTATAGTATTGGGTGAAGCCGTTATGGATGGAGACATTGAAATTGATGGTTCTATACAAGAATTAATTTTATCAGCTTACCGCTGTGGAGACAGCTTTCTACGTAATAGTAAATTTAGCAAATTGATTCCTAAACAATTTCATGATAAAAAACACAGTAAATCCGACATTCAAAAGCATTATGACATCGGAAATGATTTCTATAAACTTTGGCTTGATGATACCATGACTTATTCATGCGCCTATTTTAAACATGAAAATGACAGTCTAGAGCAAGCTCAACTAAACAAAGTACACCATATTCTTAATAAATTAAATGCTCATCCGGGAGGGAAATTACTAGATATCGGTTGTGGCTGGGGGACACTTATCATTACTGCTGCTAAAGAATATGGCTTAAATGCGACAGGTATCACCTTAAGTGAAGAGCAGGCTTCCTTCATTACTAAGCGTATCAAGGAAGAAGGATTGGAAAATAAAGTAACAGTCCTCATTAAAGATTATCGTGACATTCATGAAACATACGATTATATCACTAGTGTTGGTATGTTTGAACATGTAGGAAAAGAAAATTTATCTCAATACTTCCAAACTATTTCTAAAAGACTCAACATTAATGGTCTAGCTCTTATTCATGGTATTACTGGACAAGTGGGTGGTAATCATGGTAGTGGAACTAATTCTTGGATTAATAAGTATATCTTCCCAGGAGGATATATCCCTCGTTTAACTGAAAATTTAAATCATATAGCTAGTGCTGGACTTCAAATTGCTGACTTAGAACCGCTTCGTCGTCACTATCAAAAGACTCTCGAATTATGGACAAAAAATTTCCATAATGCCCTTCCTGAAGTTCAGAAAACTCATGATAAGCGTTTTATCAATATGTGGGACCTCTATCTTCAATCTTGTGCGGCCTCTTTTGAATCTGGCAATATTGATATTTTTCAATACTTGCTTTCAAAAGGTGTTTCAAAAGACACTATGCCTATGACACGCGATTATATGTATTCTGCTAAT

SEQ ID NO: 21604 - protein, 396 aa, Streptococcus agalactiae
MVMDSLIIKQLIKSTFDIPLQVTYPNGNIETYNGNNPHVKLKLNKNFSVSELSKDPSIVLGEAVMDGDIEIDGSIQELILSAYRCGDSFLRNSKFSKLIPKQFHDKKHSKSDIQKHYDIGNDFYKLWLDDTMTYSCAYFKHENDSLEQAQLNKVHHILNKLNAHPGGKLLDIGCGWGTLIITAAKEYGLNATGITLSEEQASFITKRIKEEGLENKVTVLIKDYRDIHETYDYITSVGMFEHVGKENLSQYFQTISKRLNINGLALIHGITGQVGGNHGSGTNSWINKYIFPGGYIPRLTENLNHIASAGLQIADLEPLRRHYQKTLELWTKNFHNALPEVQKTHDKRFINMWDLYLQSCAASFESGNIDIFQYLLSKGVSKDTMPMTRDYMYSAN

SEQ ID NO: 21605 - protein, 723 aa, Streptococcus agalactiae; identical to SEQ ID NO: 12155

SEQ ID NO: 21606 - protein, 241 aa, Streptococcus agalactiae; identical to SEQ ID NO: 12156

SEQ ID NO: 21607 - protein, 583 aa, Streptococcus agalactiae
ATGAAACAATTACAAGAATATATAGCTTTTGATTTAGAGTTTAACACGGTTGGTGAGCATAGCCATATTATTCAAGTGTCGTCCGTTAAATATTCTAATCATCAAGAGATTGCTTTATTTGATACTTATGTTCACACAAAAGTTCCATTACAAAGCTTTATTAATGGTTTAACAGGTATTACAGCTAGAGATATTATAGGGGCTCCTAAAATTGAGACAGTTTTGACAGACTTTCAGAGTTTTGTTGGAGACACACCGCTGATTGGTATAATGGGCATAAATCGGATTTACCTCTTTTAGTTGAAAATGGTTGGATCTAACTAGTCAATATCAGGTGGACTTATATGATGAAGCTTTTGTGAGACGTAGTACAGATTTAAATGGTATTGTCAACCTTAAATTGACTACTGTTGCTGACTTTTTAGGAATAAAGGGTAAGGCACATAATAGCTTAGAGGATGCCCGCATGACTGCGCGTGTTTATGAAAAATTTCTGGACTTGGATGAAAATAAAATCTATTTAAAACAGCAAAAAGAGGTAGCAGTTGATAGCCCATTTGCGACTTTAGGAAATTTGTTTGAT

SEQ ID NO: 21608 - protein, 195 aa, Streptococcus agalactiae; identical to SEQ ID NO: 12158

SEQ ID NO: 21609 - protein, 534 aa, Streptococcus agalactiae
ATGACAGTTGAAAAGACGGTTAGTGAATTAGCTGAAATTTTAGGGGTTAGTCGTCAAGCGATGAATAACAGAGTTAAAACACTCCCTGAAGAATGTGTGGAAAAGAATAGTAAAGGCGTTACAGTTGTTAATCGTGATGGCTTGATTAAATTGGAAGAAATCTATAAAAAAACTATTTTGGAAGAGGAACCAATTGATGAAGAAGCATCAAGACGAGAACTTTTAGAAATTCTCGTTGATGAGAAGAATACTGAAATCACACGTTTATATGAACAGTTAAAAGCAAAAGATATTCAGATTGCTTCAAAAGACGAGCAGTTACATGTAAAAGATATTCAAATAGCAGAGAAAGATAAGCAATTAGATCAACAACAGCAATTGACTTTAACTGCTATGGAAGATACGCAACGTCTGCAACTTGAGTTAAATGAAGCTAAAGCAGAGGTTGAAGAGATTCAAGAAGCCAAAGAAGAAAAAATTCAAGAATTAGAAGCTGTTAAAAAAAGTTTCTTTGGACGTTTCTTCAATAAAAAA

SEQ ID NO: 21610 - protein, 178 aa, Streptococcus agalactiae; identical to SEQ ID NO: 3204

SEQ ID NO: 21611 - protein, 1170 aa, Streptococcus agalactiae; identical to SEQ ID NO: 12163

SEQ ID NO: 21612 - protein, 390 aa, Streptococcus agalactiae; identical to SEQ ID NO: 12164

SEQ ID NO: 21613 - protein, 780 aa, Streptococcus agalactiae; identical to SEQ ID NO: 6297

SEQ ID NO: 21614 - protein, 260 aa, Streptococcus agalactiae; identical to SEQ ID NO: 6298

SEQ ID NO: 21615 - protein, 267 aa, Streptococcus agalactiae; identical to SEQ ID NO: 12167

SEQ ID NO: 21616 - protein, 89 aa, Streptococcus agalactiae; identical to SEQ ID NO: 12168

SEQ ID NO: 21617 - protein, 1023 aa, Streptococcus agalactiae
ATGTTACATTTTGAAAATGATTATAATAAAGGAGCTCATACAGAGCTTTTGAATGCCCTTATTGAAACTAATGATCAAGGTCTATCGGGATATAGGACAGATAGTTACTGTCAACAAGCGGCAGATAAAATTCGAGAAGTCTGTTCCTGTCCACAAGCTGAAGTTGAGTTTTTAGTGGGTGGTACTCAAACAAATCAAGTAGTTATCAGTAGTATGCTTGCTTCTTATGAAGGAGTTATTGCTGCAGAAACAGGTCATGTGAGTAGTCATGAAGCAGGAGCCATAGAATTTTCAGGTCATAAGGTATTGACTTTACCTTCTCATAATGGGAAATTACTCGCAAGCGAAGTTGCAACTTATATTGAGACTTTTTATGCTGATGGTAATTACCAACACATGGTTTTTCCAGGAATGGTTTATATATCACATCCAACAGAATATGGAACACTTTATAGTAAAGCAGAACTAGAAGAGTTGTCGAAGATTTGTAAACATTATCAAATCCCCTTATTTATTGACGGTGCTCGTCTGGGGTATGGTTTGGCTGCGAAAGATACAGATGTTGATTTCCCAACGATTGCAGCCTTATCAGATGTTTTTTATATTGGCGGAACTAAAATGGGGGCTCTTGCTGGGGAAGCAGTTGTTTTCACAAAGAAAAATCGTCCAAAACAGTTTACTACAATTGTAAAGCAGCATGGTGCGTTATTAGCCAAGGGAAGATTGCTGGGACTTGCTTTTGATCGTTTCTTTACGGATGACCTTTACTTAAAAATTGGAAAGCATGCGATCGACTTAGCAGAGGAATTAAAAATCATTTTAGAAGAAAAAGGTTACTCATTCTATTTAAAATCACCAACTAATCAACAATTTATTATTGTAGAAAATACAAAACTAGCAGATTTAGCAAAGAATGTAGCTTATAGTTTTTGGGAAAAATATGATGACCATCATACTGTAATACGTCTAGCAACTAGTTGGTCAACTAGTCGCGAAGATGTAACTGCTTTAAGAAATGTCTTG

SEQ ID NO: 21618 - protein, 341 aa, Streptococcus agalactiae
MLHFENDYNKGAHTELLNALIETNDQGLSGYRTDSYCQQAADKIREVCSCPQAEVEFLVGGTQTNQVVISSMLASYEGVIAAETGHVSSHEAGAIEFSGHKVLTLPSHNGKLLASEVATYIETFYADGNYQHMVFPGMVYISHPTEYGTLYSKAELEELSKICKHYQIPLFIDGARLGYGLAAKDTDVDFPTIAALSDVFYIGGTKMGALAGEAVVFTKKNRPKQFTTIVKQHGALLAKGRLLGLAFDRFFTDDLYLKIGKHAIDLAEELKIILEEKGYSFYLKSPTNQQFIIVENTKLADLAKNVAYSFWEKYDDHHTVIRLATSWSTSREDVTALRNVL

SEQ ID NO: 21619 - protein, 1008 aa, Streptococcus agalactiae; identical to SEQ ID NO: 12171

SEQ ID NO: 21620 - protein, 336 aa, Streptococcus agalactiae; identical to SEQ ID NO: 12172

SEQ ID NO: 21621 - protein, 405 aa, Streptococcus agalactiae; identical to SEQ ID NO: 12173

SEQ ID NO: 21622 - protein, 135 aa, Streptococcus agalactiae; identical to SEQ ID NO: 12174

SEQ ID NO: 21623 - protein, 690 aa, Streptococcus agalactiae; identical to SEQ ID NO: 12175

SEQ ID NO: 21624 - protein, 230 aa, Streptococcus agalactiae; identical to SEQ ID NO: 12176

SEQ ID NO: 21625 - protein, 228 aa, Streptococcus agalactiae; identical to SEQ ID NO: 6309

SEQ ID NO: 21626 - protein, 76 aa, Streptococcus agalactiae; identical to SEQ ID NO: 3218

SEQ ID NO: 21627 - protein, 1677 aa, Streptococcus agalactiae; identical to SEQ ID NO: 12179

SEQ ID NO: 21628 - protein, 559 aa, Streptococcus agalactiae; identical to SEQ ID NO: 12180

SEQ ID NO: 21629 - protein, 507 aa, Streptococcus agalactiae; identical to SEQ ID NO: 12181

SEQ ID NO: 21630 - protein, 169 aa, Streptococcus agalactiae; identical to SEQ ID NO: 3222

SEQ ID NO: 21631 - protein, 1344 aa, Streptococcus agalactiae; identical to SEQ ID NO: 12183

SEQ ID NO: 21632 - protein, 448 aa, Streptococcus agalactiae; identical to SEQ ID NO: 12184

SEQ ID NO: 21633 - protein, 369 aa, Streptococcus agalactiae; identical to SEQ ID NO: 12185

SEQ ID NO: 21634 - protein, 123 aa, Streptococcus agalactiae; identical to SEQ ID NO: 3226

SEQ ID NO: 21635 - protein, 537 aa, Streptococcus agalactiae; identical to SEQ ID NO: 12187

SEQ ID NO: 21636 - protein, 179 aa, Streptococcus agalactiae; identical to SEQ ID NO: 6320

SEQ ID NO: 21637 - protein, 1194 aa, Streptococcus agalactiae; identical to SEQ ID NO: 12189

SEQ ID NO: 21638 - protein, 398 aa, Streptococcus agalactiae; identical to SEQ ID NO: 3230

SEQ ID NO: 21639 - protein, 867 aa, Streptococcus agalactiae
ATGAAGACTACAAAAGTTTTTTCAGTTTTATCGTTATCTGTTGCTGTATTTATGATGACAGCATGTCAGTCAAACCACAGCACTAAAAAAGCTGATATGTCTCCAGATAAGGTGGAGCAAAAGACGAAATTTAAAAATATTTCTCTAAGTTCTAATAAACTGTTGGCTAAGGAAAACACTATGTCTGTCCTTTGGTATCAAAATTCTGCAGAAGCCAAGGCTTTATATTTACAAGGTTATAATGTTGCTAAAATGAAGTTAGATGATTGGTTACAAAAGCCCAGTGAAAAACCATATTCAATTATCTTAGATTTAGATGAAACAGTTTTAGATAATAGCCCATATCAAGCAAAGAATATTAAAGATGGCTCTAGTTTCACGCCAGAGAGTTGGGATAAATGGGTGCAAAAGAAATCAGCTAAGGCTGTTGCGGGTGCCAAAGAATTTTTGAAGTATGCTAATGAAAAGGGAACAAAAATTTATTATGTCTCAGATCGTACAGATGCCCAAGTTGATGCGACTAAAGAAAATTTAGAGAAAGAAGGTATACCTGTTCAAGGGAAAGACCACTTGCTTTTCCTTAAAAAAGGAATGAAATCTAAAGAGAGTCGCCGTCAGGCAGTTCAAAAAGATACCAATTTAATTATGCTTTTTGGAGATAATTTAGTTGATTTTGCTGATTTTTCTAAATCATCTAGTACAGATAGAGAACAACTACTAACTAAACTTCAAAGTGAGTTTGGTAGTAAATTTATTGTTTTCCCAAATCCTATGTACGGTTCTTGGGAAAGTGCTATTTATCAAGGAAAACATCTGGATGTTCAAAAACAATTGAAAGAACGACAAAAAATGTTGCATTCGTATGAT

SEQ ID NO: 21640 - protein, 289 aa, Streptococcus agalactiae
MKTTKVFSVLSLSVAVFMMTACQSNHSTKKADMSPDKVEQKTKFKNISLSSNKLLAKENTMSVLWYQNSAEAKALYLQGYNVAKMKLDDWLQKPSEKPYSIILDLDETVLDNSPYQAKNIKDGSSFTPESWDKWVQKKSAKAVAGAKEFLKYANEKGTKIYYVSDRTDAQVDATKENLEKEGIPVQGKDHLLFLKKGMKSKESRRQAVQKDTNLIMLFGDNLVDFADFSKSSSTDREQLLTKLQSEFGSKFIVFPNPMYGSWESAIYQGKHLDVQKQLKERQKMLHSYD

SEQ ID NO: 21641 - protein, 1002 aa, Streptococcus agalactiae
ATGGTAGTTAAAGTTGGTATTAACGGTTTCGGTCGTATCGGTCGTCTTGCATTCCGTCGCATCCAAAACGTAGAAGGTGTTGAAGTTACTCGTATCAACGACCTTACAGATCCAAACATGCTTGCACACTTGTTGAAATATGACACAACTCAAGGTCGTTTCGACGGTACTGTTGAAGTTAAAGAAGGTGGATTCGAAGTTAACGGTCAATTTGTTAAAGTTTCTGCTGAACGCGAACCAGCAAACATTGACTGGGCTACTGATGGCGTAGAAATCGTTCTTGAAGCAACTGGTTTCTTTGCATCAAAAGAAAAAGCTGAACAACACATCCATGAAAATGGTGCTAAAAAAGTTGTTATCACAGCTCCTGGTGGAAACGACGTTAAAACAGTTGTTTTCAACACTAACCACGATATCCTTGATGGAACTGAAACAGTTATCTCAGGTGCTTCATGTACTACAAACTGTCTTGCTCCAATGGCTAAAGCTTTACAAGACAACTTTGGTGTTAAACAAGGTTTGATGACTACTATCCACGCATACACTGGTGACCAAATGATCCTTGACGGACCACACCGTGGTGGTGACCTTCGTCGTGCTCGTGCAGGTGCTGCAAACATCGTTCCTAACTCAACTGGTGCTGCAAAAGCTATCGGTCTTGTTATCCCAGAATTGAACGGTAAACTTGATGGTGCTGCACAACGTGTTCCTGTTCCAACTGGATCAGTAACTGAATTGGTTGCAACTCTGAAAAGACGTAACTGTGAAAAGTAATGCAGCTATGAAGCAGCAGCTAACGATTCATACGGTTATACTGAAGATCCAATCGTATCATCTGATATCGTTGGTATTTCATACGGTTCATTGTTTGATGCTACTCAAACTAAAGTTCAAACTGTTGACGGTAACCAATTGGTTAAAGTTGTTTCATGGTACGATAACGAAATGTCATACACTTCACAACTTGTTCGTACACTTGAATACTTTGCAAAAATTGCAAAA

SEQ ID NO: 21642 - protein, 336 aa, Streptococcus agalactiae
  VARIANT 256, 264: Xaa = Any Amino Acid
MVVKVGINGFGRIGRLAFRRIQNVEGVEVTRINDLTDPNMLAHLLKYDTTQGRFDGTVEVKEGGFEVNGQFVKVSAEREPANIDWATDGVEIVLEATGFFASKEKAEQHIHENGAKKVVITAPGGNDVKTVVFNTNHDILDGTETVISGASCTTNCLAPMAKALQDNFGVKQGLMTTIHAYTGDQMILDGPHRGGDLRRARAGAANIVPNSTGAAKAIGLVIPELNGKLDGAAQRVPVPTGSVTELVATLEKDVTXEEVNAAMXAAANDSYGYTEDPIVSSDIVGISYGSLFDATQTKVQTVDGNQLVKVVSWYDNEMSYTSQLVRTLEYFAKIAK

SEQ ID NO: 21643 - protein, 1393 aa, Streptococcus agalactiae
ATGGATAAAATCGGTGCTGACTTCCTCTATTCAGTACAATCACTTCATGACCGTCTCAAGCGAATGCACACCCAATTCAATTGCCAATTGGTTCAGAAGACGATTTCCGTGGTATCATTGACTTAATCAAAATGAAAGCTGAAATCTATACTAATGATCTTGGTACAGATATCCTTGAAGAAGACATTCCAGCAGAGTATGTTGATCAAGCAAATGAATACCGTGAAAAATTAGTAGAAGCAGTTGCTGATACTGATGAAGATTTGATGATGAAATACCTTGAAGGTGAAGAAATCACTAACGAAGAGTTGATGGCTGCTATTCGTAAAGCAACTATCAACGTTGAATTCTATCCTGTATTGTGTGGTTCAGCCTTCAAGAATAAAGGTGTTCAATTGATGCTTGATGCTGTTATTGATTACCTTCCAAGCCCACTTGATATTCCTGCAATCAAAGGTATTAACCCTGATACTGACGAAGAAGAAACACGCCCTGCTTCAGATGAAGAGCCATTTGCAGCGCTTGCCTTCAAGATCATGACAGATCCTTTCGTGGGTCGCTTAACATTCTTCCGTGTGTACTCAGGTGTTCTTAATTCAGGTTCATACGTGTTGAATACATCTAAAGGTAAACGTGAACGTATCGGACGTATCTTACAAATGCACGCAAATAGTCGTCAAGAAATTGAAACTGTTTATGCTGGTGATATCGCAGCGGCTGTTGGTTTGAAAGATACAACTACAGGTGATTCATTGACTGAGAAAAATCAAAAGTTATCTGAATCAATTGAAGTTCCAGAACCAGTTATCCAATTGATGGTTGAGCCAAAATCTAAAGCTGACCAAGATAAAATGGGTATCGCCCTTCAAAAACTTGCTGAAGAAGACCCAACGTTCCGCGTTGAAACTAACGTTGAAACTGGTGAAACAGTTATCTCAGGAATGGGTGAACTTCACCTTGATGTCCTTGTTGACCGTATGAAACGTGAATTCAAAGTTGAAGCAAACGTTGGGGCACCCCAAGTATCATACCGCGAAACATTCCGCGCTTCTACACAAGCACGTGGATTCTTCAAACGCCAATCTGGTGGTAAAGGTCAATTTGGTGATGTTTGGATTGAATTTACACCAAACGAAGAAGGTAAAGGATTCGAATTCGAAAATGCTATCGTCGGTGGTGTGGTTCCTCGTGAATTTATTCCAGCCGTTGAAAAAGGACTTGTAGAATCTATGGCAAACGGTGTTCTTGCTGGATATCCAATGGTTGACGTAAAAGCTAAACTTTACGATGGTTCATACCATGATGTTGACTCATCGAGACAGCCTTCAAGATTGCTGCATCACTTGCACTTAAAGAAGCTGCTAAATCAGCGCAACCAGCTATCCTGNNNNNT

SEQ ID NO: 21644 - protein, 466 aa, Streptococcus agalactiae
  VARIANT 465, 466: Xaa = Any Amino Acid
MDKIGADFLYSVQSLHDRLQANAHPIQLPIGSEDDFRGIIDLIKMKAEIYTNDLGTDILEEDIPAEYVDQANEYREKLVEAVADTDEDLMMKYLEGEEITNEELMAAIRKATINVEFYPVLCGSAFKNKGVQLMLDAVIDYLPSPLDIPAIKGINPDTDEEETRPASDEEPFAALAFKIMTDPFVGRLTFFRVYSGVLNSGSYVLNTSKGKRERIGRILQMHANSRQEIETVYAGDIAAAVGLKDTTTGDSLTDEKSKVILESIEVPEPVIQLMVEPKSKADQDKMGIALQKLAEEDPTFRVETNVETGETVISGMGELHLDVLVDRMKREFKVEANVGAPQVSYRETFRASTQARGFFKRQSGGKGQFGDVWIEFTPNEEGKGFEFENAIVGGVVPREFIPAVEKGLVESMANGVLAGYPMVDVKAKLYDGSYHDVDSSETAFKIAASLALKEAAKSAQPAILXX

SEQ ID NO: 21645 - protein, 475 aa, Streptococcus agalactiae
ATGAGTCGTAAAAATCAAGCGCCTAAACGCGAAGTATTACCAGATCCATTGTATAACTCAAAAATCGTTACACGTCTTATCAACCGTGTAATGCTTGATGGTAAACGTGGTACTGCTGCAACTATCGTATATGATGCTTTTGAAGCAATTAAAGAAGCTACTGGAACAGATGCTCTTGAAGTATTCGAAACAGCTATGGAAAACATCATGCCTGTACTTGAGGTACGCGCACGCCGTGTTGGTGGATCAAACTACCAAGTTCCTGTCGAAGTTCGTCCAGAACGTCGTACAACTTTAGGACTTCGTTGGTTGGTTAACGCATCACGTGCTCGTGGTGAACCACTATGAAAGATCGTCTTGCAAAAGAATCATGGATGCTGCAAACAACACAGGAGCATCAGTTAAGAAACGTGAAGATACTCACAAAATGGCTGAAGCTAACCGTGCCTTTGCACACTTCCNNNNNTTAATTAAT

SEQ ID NO: 21646 - protein, 159 aa, Streptococcus agalactiae
  VARIANT 155, 156: Xaa = Any Amino Acid
MSRKNQAPKREVLPDPLYNSKIVTRLINRVMLDGKRGTAATIVYDAFEAIKEATGTDALEVFETAMENIMPVLEVRARRVGGSNYQVPVEVRPERRTTLGLRWLVNASRARGEHTMKDRLAKEIMDAANNTGASVKKREDTHKMAEANRAFAHFXXLIN

SEQ ID NO: 21647 - protein, 411 aa, Streptococcus agalactiae; identical to SEQ ID NO: 12205

SEQ ID NO: 21648 - protein, 137 aa, Streptococcus agalactiae; identical to SEQ ID NO: 3240

SEQ ID NO: 21649 - protein, 810 aa, Streptococcus agalactiae; identical to SEQ ID NO: 12207

SEQ ID NO: 21650 - protein, 270 aa, Streptococcus agalactiae; identical to SEQ ID NO: 3242

SEQ ID NO: 21651 - protein, 939 aa, Streptococcus agalactiae; identical to SEQ ID NO: 12209

SEQ ID NO: 21652 - protein, 313 aa, Streptococcus agalactiae; identical to SEQ ID NO: 12210

SEQ ID NO: 21653 - protein, 1272 aa, Streptococcus agalactiae; identical to SEQ ID NO: 12211

SEQ ID NO: 21654 - protein, 424 aa, Streptococcus agalactiae; identical to SEQ ID NO: 12212

SEQ ID NO: 21655 - protein, 630 aa, Streptococcus agalactiae; identical to SEQ ID NO: 12213

SEQ ID NO: 21656 - protein, 210 aa, Streptococcus agalactiae; identical to SEQ ID NO: 12214

SEQ ID NO: 21657 - protein, 660 aa, Streptococcus agalactiae; identical to SEQ ID NO: 12215

SEQ ID NO: 21658 - protein, 220 aa, Streptococcus agalactiae; identical to SEQ ID NO: 12216

SEQ ID NO: 21659 - protein, 870 aa, Streptococcus agalactiae
TTGCAAGGTAGAATTGTCAAGTCGCTAGCAGGTTTTTATTATGTGGAATCTGACGGTGTTGTTTATCAGACACGTGCGCGTGGAAATTTTAGAAAAAAAGGTCAAATTCCCTACGTTGGGGATTGGGTTGAATTTTCTTCGCAAGATCAATCAGAAGGATATATTCTATCAATTGAAGAGCGTAAAAATAGCCTCGTACGACCACCTATTGTTAATATTGATCAAGCTGTCGTTATCATGTCTGCTAAAGAACCTGATTTTAACGCTAACTTATTAGACCGGTTCTTAGTACTTCTAGAATATAAGATGATTCAGCCTATCATTTATATTTCCAAGTTGGATTTGTTAGACGATTTGGTTGTTATTGATGATATTCGCGAACATTATCAGAATATAGGCTATGTTTTCTGTTATTCTCAAGAGGAACTCTTGCCTCTGTTAGCAGATAAAGTGACTGTTTTTATGGGGCAGACAGGTGTCGGAAAATCAACGCTTCTCAACAAAATTGCTCCTGAGTTGAAACTTGAAACTGGTGAAATTTCGGATAGTTTAGGCCGTGGCCGACACACCACAAGAGCAGTTAGTTTCTATAATGTTCATAAAGGAAAAATTGCAGACACTCCTGGTTTTTCTTCTTTGGATTATGAAGTGGACAATGCAGAGGACTTAAACGAATCCTTTCCAGAGCTTCGTAGACTTAGTCATTTTTGTAAATTCCGCTCGTGTACGCATACACATGAGCCTAAATGTGCTGTAAAAGAAGCCTTGACTCAAGGTCAGTTATGGCAAGTCCGCTATGATAACTACCTCCAATTTTTAAGTGAAATTGAGAACCGCCGTGAAACATATAAGAAAGTTATTAAAAGAAAG

SEQ ID NO: 21660 - protein, 290 aa, Streptococcus agalactiae; identical to SEQ ID NO: 12218

SEQ ID NO: 21661 - protein, 849 aa, Streptococcus agalactiae; identical to SEQ ID NO: 12219

SEQ ID NO: 21662 - protein, 283 aa, Streptococcus agalactiae; identical to SEQ ID NO: 12220

SEQ ID NO: 21663 - protein, 870 aa, Streptococcus agalactiae
ATGAGAATCGCAGATAAAACCGTTACCCGCGCTATTTTGGAGCGTCATGGGTTTACATTTAAGAAATCATTCGGCCAGAACTTTTTGACCGATACGAATATTTTACAGAAGATTGTTGACACGGCAGAGATTGACAAGGGTGTCAACGTGATTGAGATTGGTCCTGGTATCGGGGCTTTGACAGAGTTTTTGGCTGAGAATGCAGCTGAGGTGATGGCTTTTGAGATAGATGATCGTCTCATTCCTATCCTTGCTGATACGCTTGCGCGTTTTGACAATGTCCAAGTGGTCAATCAGGATATCCTCAAGGCTGATTTGCAGACGCAAATTCAAGCCTTCAAGAATCCTGATCTGCCTATCAAGGTGGTCGCAAACCTGCCTTACTACATCACAACACCAATCCTTATGCACTTGATTGAGAGCAAGATTCCTTTTGCGGAGTTTGTGGTCATGATGCAAAAAGAAGTGGCAGATCGTATTTCAGCTATGCCAAATACTAAAGCATACGGTTCTTTGTCAATCGCAGTGCAGTATTATATGACTGCCAAAGTATCATTTATCGTTCCGAGAACTGTTTTTGTTCCTGCTCCAAATGTAGATTCAGTTATTTTGAAAATGGTCCGTAGAGATCAACCAGTAGTGAGTGTTCAAGATGAGGATTTCTTTTTCAGAGTGTCAAAAGTAGCCTTCGTACATCGTCGTAAAACACTTTGGAATAATCTAACGAGTCATTTTGGAAAATCAGAAGATACTAAAGCAAAATTGGAAAAAGCATTAGAAATAGCAAAAATTAAGCCATCTATTCGCGGAGAAGCCTTATCTATCCCTGATTTTGCAAGTTTAGCAGATGCCTTGAAAGAGGTTGAGATA

SEQ ID NO: 21664 - protein, 290 aa, Streptococcus agalactiae
MRIADKTVTRAILERHGFTFKKSFGQNFLTDTNILQKIVDTAEIDKGVNVIEIGPGIGALTEFLAENAAEVMAFEIDDRLIPILADTLARFDNVQVVNQDILKADLQTQIQAFKNPDLPIKVVANLPYYITTPILMHLIESKIPFAEFVVMMQKEVADRISAMPNTKAYGSLSIAVQYYMTAKVSFIVPRTVFVPAPNVDSVILKMVRRDQPVVSVQDEDFFFRVSKVAFVHRRKTLWNNLTSHFGKSEDTKAKLEKALEIAKIKPSIRGEALSIPDFASLADALKEVEI

SEQ ID NO: 21665 - protein, 447 aa, Streptococcus agalactiae; identical to SEQ ID NO: 12223

SEQ ID NO: 21666 - protein, 149 aa, Streptococcus agalactiae; identical to SEQ ID NO: 12224

SEQ ID NO: 21667 - protein, 564 aa, Streptococcus agalactiae; identical to SEQ ID NO: 12225

SEQ ID NO: 21668 - protein, 188 aa, Streptococcus agalactiae; identical to SEQ ID NO: 12226

SEQ ID NO: 21669 - protein, 852 aa, Streptococcus agalactiae; identical to SEQ ID NO: 12227

SEQ ID NO: 21670 - protein, 284 aa, Streptococcus agalactiae; identical to SEQ ID NO: 12228

SEQ ID NO: 21671 - protein, 270 aa, Streptococcus agalactiae; identical to SEQ ID NO: 12229

SEQ ID NO: 21672 - protein, 90 aa, Streptococcus agalactiae; identical to SEQ ID NO: 12230

SEQ ID NO: 21673 - protein, 390 aa, Streptococcus agalactiae; identical to SEQ ID NO: 12231

SEQ ID NO: 21674 - protein, 130 aa, Streptococcus agalactiae; identical to SEQ ID NO: 7960

SEQ ID NO: 21675 - protein, 1290 aa, Streptococcus agalactiae; identical to SEQ ID NO: 12233

SEQ ID NO: 21676 - protein, 430 aa, Streptococcus agalactiae; identical to SEQ ID NO: 7962

SEQ ID NO: 21677 - protein, 390 aa, Streptococcus agalactiae; identical to SEQ ID NO: 12235

SEQ ID NO: 21678 - protein, 130 aa, Streptococcus agalactiae; identical to SEQ ID NO: 12236

SEQ ID NO: 21679 - protein, 1260 aa, Streptococcus agalactiae; identical to SEQ ID NO: 12237

SEQ ID NO: 21680 - protein, 420 aa, Streptococcus agalactiae; identical to SEQ ID NO: 12238

SEQ ID NO: 21681 - protein, 237 aa, Streptococcus agalactiae; identical to SEQ ID NO: 12239

SEQ ID NO: 21682 - protein, 79 aa, Streptococcus agalactiae; identical to SEQ ID NO: 3278

SEQ ID NO: 21683 - protein, 1263 aa, Streptococcus agalactiae; identical to SEQ ID NO: 12241

SEQ ID NO: 21684 - protein, 421 aa, Streptococcus agalactiae; identical to SEQ ID NO: 3280

SEQ ID NO: 21685 - protein, 1533 aa, Streptococcus agalactiae; identical to SEQ ID NO: 12243

SEQ ID NO: 21686 - protein, 511 aa, Streptococcus agalactiae [sequence omitted]

SEQ ID NO: 21687 - protein, 1185 aa, Streptococcus agalactiae
ATGTTTAGTGATTTACGCAAAAAATTTGTCTTTTTGACCATGTCAATCCTTATTGTCGTTGTTCTCTTTCTCTTTGCAGTGAGTAATCGCTACAATCAATATTGGGATGAATATGATGCATATAGGATTGTTAAATTAGTTGCTAAAAATGATTATTTAGGAATACCAGGCGATGAACCGATTGCTTTGGTGACTATAGATAACCAAAAGATGGTTAAGATTCAAAGCAATAATACTGATTTGACAAATGATGTTATCGAAAAATCTAGTTTAAAGCTCCTTGAGCAAGGAAAGAAGTCACGAAAATGGAAGTCTTTTATATATTCCATAAAAGAATATAAAGATAAAACTTACACCATAGCTATTATGGATTTGGCTAGTTATGAAGTCCCTTATGCAAGGCGTTTTCTCATTCTTGTTTTTACTATTTTTGGATTTTGTTTATTAGCAGCTGTAAGTCTTTATCTTTCTCGATTTATCGTAGGGCCTGTAGAGACAGAAATGACTCGCGAAAAACAGTTCGTTTCAGATGCGAGTCATGAGCTGAAGACCCCTATTGCAGCTATACGAGCCAACGTTCAGGTTCTGGAACAGCAAATTCCAGGAAATCGTTATCTGGATCATGTTGTTTCGGAGACTAAGCGAATGGAGTTTTTAATTGAAGATTTGCTTAATTTGTCTAGACTTGATGAAAAACGCTCCAAGGTAAATTTCAAAAAGTTAAACTTATCTGTCTTATGTCAAGAAGTACTTCTAACATATGAAAGTTTGGCATATGAAGAAGAAAAATGTTTAAATGATACAATTGAAGATGATGTCTGGATTGTTGGAGAAGAGAGTCAAATTAAGCAAATTTTAATAATTCTTTTGGATAATGCTATTAGGCATTCTTTGTCAAAATCAGCAATCCAGTTTAGTCTTAAACAGGCTCGAAGAAAAGCTATTCTGACAATATCAAATCCAAGTGCTATCTATTCCAAAGAGGTTATGGATAATCTCTTTGAGCGTTTTTATCAAGCTAAAGATGATCATGCAGATTCTCTCAGTTTTGGTCTAGGCTTATCTATTGCTAAGGCAATCGTGGAACGCCATAAGGGGAGAATTAGAGCATATCAAGAAAAAGACCAATTACGTCTTGAAGTCCAGTTACCAATTGATGGATTTTGGACCAATACCATGATTAAT

SEQ ID NO: 21688 - protein, 395 aa, Streptococcus agalactiae; identical to SEQ ID NO: 3284

SEQ ID NO: 21689 - protein, 615 aa, Streptococcus agalactiae
TTGGCAGATAAAGGTTATTCTGTTGATTTAGTATTTGATGGAGATGATGGGTTAGAATACATTTTGACAGGTCTCTATGATTTAGTCTTGTTGGATATTATGTTACCCAAACGCTCAGGATTATCTATTTTAAAAAGAGTGAGGGAAGCTGGTTTAGAAACCCCAATAATCTTTTTAACTGCAAAATCACAGACTTATGATAAAGTTAATGGTTTAGATTTAGGGGCAGATGATTATATCACAAAACCCTTTGAAGCAGATGAATTGCTAGCTAGAATTAGGTTGAGAACCAGACAATCTTCTCTGATCAGAGCAAATCAATTGCGGCTTGGAAATATAAGGCTTAACACAGATTCACATGAGCTAGAATCTAAAGAAAGTAGTGTAAAATTATCCAATAAAGAATTTCTCTTGATGGAAGTTTTTATGCGAAATGCAAAGCAGATTATTCCTAAAAACCAGTTGATTTCTAAGGTTTGGGGACCTTCAGACAATTCAGAATATAACCAGTTAGAAGTATTTATTTCTTTTTTGCGAAAAAAATTGCGCTTTTTAAAAGCAGACATTGAAATAATAACCACTAAGGGCTTTGGATATTCCTTGGAGGAGATGACA

SEQ ID NO: 21690 - protein, 205 aa, Streptococcus agalactiae
MADKGYSVDLVFDGDDGLEYILTGLYDLVLLDIMLPKRSGLSILKRVREAGLETPIIFLTAKSQTYDKVNGLDLGADDYITKPFEADELLARIRLRTRQSSLIRANQLRLGNIRLNTDSHELESKESSVKLSNKEFLLMEVFMRNAKQIIPKNQLISKVWGPSDNSEYNQLEVFISFLRKKLRFLKADIEIITTKGFGYSLEEMT

SEQ ID NO: 21691 - protein, 1353 aa, Streptococcus agalactiae
ATGAAAAAAGAAAGTATATCTATTAAAGATATCTTGTGGTTTATTATTCCGTCGTTATTTGGAGTATTATTATTAATGACTCCATTTAAATATAATGGTATGACAACAGTAGCTGTCTCTGTAATATCTAAGACAATTAATCAATGGATTAACGCTGTTTTTCCTATACATTATATTATTTTACTAATCATTTTTATTTCATGTGTGTTAGCACTTTGTTATCGTCTGTTTAGACCTAGCTTTATTGAAAAAAATGACTTGTTAAAAGAAATTTCTGACATTACCATTTTCTGGCTGATTATTCGTTTGATCGGTTTGGCACTTGGTCTGATGACGGTTTTACATATTGGTCCTGAAATGGTATGGGGGAAAGAGACAGGCGGCCTTATCCTTTTTGATTTGATTGGTGGTTTGTTTACCATTTTCCTTGCTGCGGGTTTTATTCTTCCATTTTTGACAGAATTTGGTCTACTGGAGTTTGTTGGTGTCTTCTTAACCCCCATTATGCGTCCATTCTTTCAGCTACCTGGTCGGTCAGCAGTTAATTGTGTAGCCTCATTTGTAGGTGATGGCACTATTGGAATTGCTTTGACCGATAAGCAGTATGTTGAGGGTTATTATACCAGTAGAGAAGCTGCAACGATTTCCACTACTTTTTCAGCAGTATCAATCACTTTTTGTCTTGTTGTTTTGCAGAATGTTGGCTTAACTGATTATTTTGGCCATTTTTATCTAACAGTCATCATTAGCAGTGTTGTCTGTGCATTCATTATCCCTTATATCCCTCCCTTATCTCGTCAATCAAATAGTTACTACACTAAACCAAAGAAAGAAACATCTGAGGTAATTCCGGATGGTTATAACAAGATAGAGTGGGGACTTAAGCTTGCCATCGATAAATCAAAAGCAAATGGAAACATGAAGACTTTTGTCAATAATGCCTCTAAGACAGTACTTAGTTTATGGTTTGGCGTTATGCCAACAATTATGACTGTCGGAACAATAGCTTTGATTATTTCAGTATCAACACCTATTTTTAAAATTTTAGGCACACCATTCCTTCCGTTCCTTGAACTTTTAGGGATTCCAGAAGCAGATATTGCGAGTCAAACCATGATTGTTGGTTTTTCAGATATGGTTGTTCCTTCGATAATGGCGGCTGAAATTCACAGTGAGATGACAAGGTTTATTGTCGCAACAGTTTCTATTGTGCAATTAATTTATATGTCTGAGACTGGTGCGGTGATATTAGGTTCCAAGATCCCTATCAACATTCTAGAATTATTTATCATTTTTATAGAGAGAACAATTATTTCATTACCTATTATTGTTTTGATGGCACATCTTTTCTTT

SEQ ID NO: 21692 - protein, 451 aa, Streptococcus agalactiae
MKKESISIKDILWFIIPSLFGVLLLMTPFKYNGMTTVAVSVISKTINQWINAVFPIHYIILLIIFISCVLALCYRLFRPSFIEKNDLLKEISDITIFWLIIRLIGLALGLMTVLHIGPEMVWGKETGGLILFDLIGGLFTIFLAAGFILPFLTEFGLLEFVGVFLTPIMRPFFQLPGRSAVNCVASFVGDGTIGIALTDKQYVEGYYTSREAATISTTFSAVSITFCLVVLQNVGLTDYFGHFYLTVIISSVVCAFIIPYIPPLSRQSNSYYTKPKKETSEVIPDGYNKIEWGLKLAIDKSKANGNMKTFVNNASKTVLSLWFGVMPTIMTVGTIALIISVSTPIFKILGTPFLPFLELLGIPEADIASQTMIVGFSDMVVPSIMAAEIHSEMTRFIVATVSIVQLIYMSETGAVILGSKIPINILELFIIFIERTIISLPIIVLMAHLFF

SEQ ID NO: 21693 - protein, 1725 aa, Streptococcus agalactiae
TTGGAAAATTTATTACAACATAAGTTACCGGTCGCACCATTTGTAGAGTCAGCGACCAATTGGATTACGAAAACTTTTTCTGGTTTATTTGACTTTATCCAGACAATCGGTAATGCATTGATGGATTGGATGACAAAAACATTACTATTCATTAATCCTTTACTTTTTATTGTACTAATTACAGCTGCTGTATTTTTCTTAGCTAAGAAAAAATGGCAATTACCGACATTTACTTTCATTGGTTTGCTATTTATCTATAACCAAGGGCTGTGGGAGCAGTTGATTAACACTTTTAACTTGGTTTTAGTAGCAAGTTTAATTTCTATTATTATTGGTGTACCACTAGGTATTTGGATGGCAAAAAGTGATAAAGTTAAACAAGTTGTTAATCCAATTCTTGACTTTATGCAAACTATGCCAGCATTCGTTTACCTTATTCCTGCAGTAGCCTTCTTTGGTATCGGTATGGTACCAGGTGTCTTTGCCTCTGTTGTATTTGCTTTGCCTCCAACAGTGCGCTTTACTAACTTGGCTATTCGTGAAATCCCACTTGAGTTAATAGAAGCATCTGATTCATTTGGTTCAACAGCTAAGCAAAAATTATTCAAAGTTGAACTACCACTTGCTAAGAACACTATTATGGCAGGAATCAATCAAACTATGATGTTGGCTCTTTCTATGGTGGTTACAGGATCTATGATCGGTGCACCTGGACTTGGTCGTGAAGTGTTATCGGCGCTTCAACATGCTGACATTGGTACAGGGTTTGTTAGTGGTCTATCGCTAGTTATTTTAGCAATCGTGTTAGACCGTGTTAGTCAATTCTTTAATTCTAAACCGGGTGAGAAGCAAGCTAAAACATCAAAAGTTAAAAAATGGGTAGGTTTAGGGGCCCTGGCTCTCTTCATTCTAGCAGCTCTTGGTCGCATTGTTGTCAATATGACTTCAGGAAATGAAGCCAAAGGTCAAAAAGTGAAAATAGCTTATGTCCAATGGGATTCAGAAGTTGCTTCAACCAACGTTATTGCTGAAGTTTTAAAATCTAAAGGATATGATGTTGAATTGACACCACTTGATAATGCAGTCATGTGGCAAACAGTTGCCAATGGGAATGCTGATTTTACAACAAGCGCTTGGTTACCAAAGACCCACGGGCAATATTTTAATAAATACAAAAATAGTTTAGATGACTTAGGTCCTCACGTTGAGAACGTCAAAATAGGTTTAGTTGTTCCTAAATACATGAACGTAAATAGTATTGAAGAATTATCAAATCAAGCAGATAAACAAATTACAGGTATCGAACCAGGTGCAGGTATTATGAAGTCTGCTAAACAATCCCTTAAAGATTATCCAAATCTTTCAAGTTGGAAGTTGTTATCAGCATCAACAGGAGCTATGACAACAACCTTAGGGAAGGCTATCAAAAACAAAGATCAAGTGGTCATTACAGGTTGGTCACCTCACTGGATGTTTGCTAAGTATGATTTAAAATACCTTAAAGATCCTAAGAAATCATTTGGTGGTGAAGAACATATCAATACAATAGCACGCAAGAATTTGAAAAAAGATATGCCAAAAGTATATAAAATTATCGATAAGTTCAAGTGGACTAAAGAAGATATGGAATCTATCATGTTAGATATGGATAAAGGTATGGAGCCTGCTAAAGCAGCTCAAAAATGGATTAAAAACCACAAAAAAGAAGTTTCAGAGTGGACTAAA

SEQ ID NO: 21694 - protein, 575 aa, Streptococcus agalactiae; identical to SEQ ID NO: 12260

SEQ ID NO: 21695 - protein, 1221 aa, Streptococcus agalactiae
ATGACAAATATTTTAGAAGTGAAGAATTTAACCAAAATTTTTGGGAAAAAGCAAAAAGCTGCTCTTGAAATGGTTAAGCAAGGAAAAAGTAAGACAGAAATTCTTGAAAAAACAGGAGCGACTGTAGGTGTCTATGATGCGAGTTTTGAAATAAAAGAAGGCGAAATTTTCGTTATCATGGGACTTTCTGGTTCAGGAAAATCAACTTTAGTTCGGATGTTAAACCGTTTGATTGACCCATCATCAGGAAATATCTATTTAGATGGTAAAGATATTGCAAAGATGAATGTAGAAGATTTACGTAACATTCGTCGTCACGATATCAACATGGTTTTCCAAAATTTTGGTCTTTTCCCACATCGTACAATTTTAGAAAATACAGAGTTTGGGTTAGAGATGCGTGGTGTTTCTAAGGAAGAACGTACAACGTTAGCTGAAAAAGCTTTGGACAATGCAGGTCTATTACCGTTTAAAGATCAATACCCCAGTCAATTATCAGGAGGAATGCAACAGCGTGTTGGTTTAGCACGTGCCCTTGCTAACAGCCCTAAAATCCTTCTGATGGATGAGGCCTTCTCAGCTTTAGACCCATTAATTCGTCGTGAAATGCAAGATGAGCTTCTTGATCTTCAAGACACGAATAAACAAACTATTATTTTTATCAGCCATGATTTGAATGAAGCGTTACGTATTGGTGATCGTATTGCTCTTATGAAAGATGGAGAAATTATGCAGATTGGTACAGGAGAAGAGATTTTGACTAATCCGGCTAATGATTTTGTTCGTGAGTTTGTTGAAGACGTTGATCGCTCAAAAGTGTTAACTGCTCAAAATATTATGATAAAACCTTTAACAACTGTTTTAGAAATTGATGGCCCACAAGTTGCTTTAACAAGAATGCATCGTGAGGAAGTCTCAATGTTAATGGCAACGAATCGTCGTCGCCAACTTCTGGGATCCCTAACCGCAGATGCTGCAATTGAAGCTCGTAAGAAAGGTTTGCCGCTTTCTGAAGTGATTGATAAAGATGTTGTAACGGTCTCAAAAGATACAGTTATTACAGACATCATGCCTTTAATTTATGATTCATCTGCTCCGATAGCCGTTACTGATGATAATGATAGACTCCTAGGGGTTATCATTAGAGGACGTGTGATCGAAGCACTTGCTAACGTTCAAGATGAAACAGTAGTAGAATCGCCAAAAGAAACGGTAGAAGCT

SEQ ID NO: 21696 - protein, 407 aa, Streptococcus agalactiae; identical to SEQ ID NO: 16906

SEQ ID NO: 21697 - protein, 2376 aa, Streptococcus agalactiae
ATGTCAGAATTTGATACAAAATCATATTTAGAAAAACTTGATGCATGGTGGAGAGCAGCTAATTATATTTCTGCAGCACAAATGTATCTAAAGGATAACCCTCTCTTGAGACGAGAGCTGGTTGAAAACGACTTAAAGGTTCATCCAATTGGTCACTGGGGCACTGTACCTGGACAAAATTTTATCTATGCTCACTTAAATCGCGCTATTAATAAATACGATTTAGACATGTTCTATATTGAAGGTCCAGGTCATGGTGGTCAAGTTATGGTATCTAATTCATATTTAGATGGTTCATATACTGAATTAAACCCCAATATTGAGCAAACAGAGGATGGCTTTAAGCAGTTATGTAAAATCTTCTCTTTCCCAGGTGGAATTGCATCCCATGCAGCACCAGAAACACCAGGGTCAATTCATGAAGGCGGTGAACTTGGTTACGCACTTTCTCATGCGACAGGTGCCATCCTGGACAATCCAGATGTTATTGCTGCGACTGTTATTGGTGATGGTGAAGGTGAAACAGGACCACTTATGGCTGGTTGGCTATCTAATACCTTTATCAATCCAGTAAATGATGGTGCTGTTCTACCAATCTTCTATTTAAATGGTGGTAAAATCCATAACCCAACTATCTTTGAACGTAAGACAGATGAAGAATTATCTCAGTTTTTTGAAGGATTAGGTTGGAAACCTATTTTTGCAGATGTTGTTGAACTCTCTGAGGATCATGCGGCTGCTCATGCTTTGTTTGCAGAAAAATTAGATCAAGCTATTCAAGAGATTAAAACCATTCAATCAGAAGCACGACAAAAACCAGCAGAAGAAGCTATCCAAGCAAAATTCCCTGTCTTAGTTGCACGTATTCCTAAGGGTTGGACTGGTCCAAAAGCTTGGGAAGGAACACCAATTGAAGGTGGCTTCCGCGCTCACCAAGTACCAATTCCAGTAGATGCCCACCATATGGAACATGTTGATTCTCTTTTGTCATGGCTTCAATCATACCGTCCAGAAGAATTATTTGATGAAAATGGTAAAATCGTTGATGAGATTGCTGCTATTTCACCAAAAGGTGATCGTCGCATGTCCATGAATCCAATAACCAATGCTGGTATTGTTAAAGCAATGGATACAGCAGATTGGAAGAAATTTGCTCTTGATATTAATGTTCCAGGTCAAATTATGGCACAAGATATGATTGAATTTGGAAAATATGCAGCAGATTTAGTAGATGCTAACCCAGATAATTTCCGTATTTTTGGTCCAGATGAAACGAAATCAAATCGTCTTCAAGAAGTGTTTACACGTACTAGCCGTCAATGGCTTGGTCGTCGTAAACCAGATTATGACGAAGCTTTAAGTCCAGCTGGACGTGTTATTGATTCCCAATTGTCTGAACATCAAGCAGAAGGTTTCTTAGAAGGTTATGTTTTAACTGGTCGTCACGGCTTCTTTGCTTCATACGAATCATTCCTTCGCGTTGTAGATTCAATGGTAACACAACATTTCAAATGGTTACGTAAATCAAAAACACACACAACATGGCGTAAAAATTATCCAGCGCTTAACCTAATTGCAGCTTCAACTGTTTTCCAACAAGATCATAATGGTTATACTCACCAAGATCCAGGTATTTTAACTCACTTAGCTGAAAAAACACCTGAATACATTCGTGAATATTTACCAGCAGATACTAACTCACTTCTAGCTGTTATGGATAAAGCGTTTAAAGCTGAAGATAAAATTAATTTAATTGTGACATCTAAGCACCCTCGTCCACAATTTTACTCTATTGCTGAAGCAGAAGAGTTAGTGGCAGAAGGATATAAGGTGATTGACTGGGCTTCAAATGTGTCGCTTAATCAAGAGCCAGATGTTGTCTTTGCTGCGGCGGGAACAGAACCTAACTTAGAAGCTTTGGCAGCAATTAGCATTCTTCATAAGGCTTTCCCAGAACTTAAGATTAGATTTGTTAATGTATTAGACATCCTAAAACTTCGTCATCCTTCACAAGATGCTCGCGGTTTATCAGATGAAGAGTTTAACAAAGTCTTTACCACAGATAAACCTGTTATTTTTGCTTTCCATGGTTATGAAGATATGATTCGAGATATTTTCTTTAGTCGTCACAATCATAATTTGCATACGCATGGTTACCGTGAAAATGGTGACATCACAACGCCATTTGATATGCGCGTGATGTCAGAATTGGACCGATTCCATCTGGCACAGGATGCAGCTCTTGCTTCTTTAGGACATGAAGCGCAAGCCTTCAGTGATGAAATGAATCAAATGGTTGCTTATCACAAAGACTATATTCGTGAACACGGAGACGATATCCCAGAAGTACAAAATTGGAAATGGGAAAATATCAAG

SEQ ID NO: 21698 - protein, 792 aa, Streptococcus agalactiae
MSEFDTKSYLEKLDAWWRAANYISAAQMYLKDNPLLRRELVENDLKVHPIGHWGTVPGQNFIYAHLNRAINKYDLDMFYIEGPGHGGQVMVSNSYLDGSYTELNPNIEQTEDGFKQLCKIFSFPGGIASHAAPETPGSIHEGGELGYALSHATGAILDNPDVIAATVIGDGEGETGPLMAGWLSNTFINPVNDGAVLPIFYLNGGKIHNPTIFERKTDEELSQFFEGLGWKPIFADVVELSEDHAAAHALFAEKLDQAIQEIKTIQSEARQKPAEEAIQAKFPVLVARIPKGWTGPKAWEGTPIEGGFRAHQVPIPVDAHHMEHVDSLLSWLQSYRPEELFDENGKIVDEIAAISPKGDRRMSMNPITNAGIVKAMDTADWKKFALDINVPGQIMAQDMIEFGKYAADLVDANPDNFRIFGPDETKSNRLQEVFTRTSRQWLGRRKPDYDEALSPAGRVIDSQLSEHQAEGFLEGYVLTGRHGFFASYESFLRVVDSMVTQHFKWLRKSKTHTTWRKNYPALNLIAASTVFQQDHNGYTHQDPGILTHLAEKTPEYIREYLPADTNSLLAVMDKAFKAEDKINLIVTSKHPRPQFYSIAEAEELVAEGYKVIDWASNVSLNQEPDVVFAAAGTEPNLEALAAISILHKAFPELKIRFVNVLDILKLRHPSQDARGLSDEEFNKVFTTDKPVIFAFHGYEDMIRDIFFSRHNHNLHTHGYRENGDITTPFDMRVMSELDRFHLAQDAALASLGHEAQAFSDEMNQMVAYHKDYIREHGDDIPEVQNWKWENIK

SEQ ID NO: 21699 - protein, 1089 aa, Streptococcus agalactiae; identical to SEQ ID NO: 12265

SEQ ID NO: 21700 - protein, 363 aa, Streptococcus agalactiae; identical to SEQ ID NO: 3304

SEQ ID NO: 21701 - protein, 1677 aa, Streptococcus agalactiae
TTGATTATTCTCGATAAAAAAAGTTATGACCTCCTCTTTTACCTATTGAAATTAGAGGAACCTGAAACAGTTATGGCAATTGCCAACGCACTTAATCAGTCTAGGCGTAAAGTGTATTATCACTTAGAGAAGATAAACGATGCACTGCCTAGCGATGTGCCTCAGATTGTTAGTTATCCACGTGTAGGAATCTTGCTAACAGAAAAACAAAAAGCAGCCTGTCGTCTTTTATTAGATGAAGTGACTGATTATAGTTACGTCATGAAAAGTAGTGAGAGGTTGCAGCTGTCTTTAGTATCTATCGTGGTAGCTAAGGACCGCATAACGATTGATAGGTTGATGCAACTAAACGATGTTTCTCGAAATACTATCTTAAACGATTTAAACGAATTAAGAAGTGAGTTAGCAGAGAAAGAATATAATTTACAGTTACAATCAACAAAATGTCGTGGTTATTTTTTAGATGGTCACCCATTGTCCATTATCCAGTACTTATATAAGCTCTTAGATGATATCTACCATAATGGAAGTAGTAGTTTTATAGACCTTTTTAATCATAAACTGTCTCAAGCTTTTGGTGCCAGCACATATTTTTCTAAAGAGGTTCTTGATTATTTTCACCATTATCTCTTCATTTCTCAACGAAGTCTAGGTAAGAAAATCAACAGTCAAGATGGTCAGTTTATGATTCAGATTTTGCCTTTTATACTAATGGCTTATCGTAAGATGCGATTAAGTCCTGAAGTACAGACCTCTCTTAATAGTGATTTTAGCTTGGTTTGGCAACGTAAGGAATATGAGATTGCTAAAGAGTTGGCTGATGAGCTGGAAGAAAATTTTCAGTTATCACTGGATGAGATTGAAGTGGGACTAGTAGCCATGCTTATGCTTAGTTTCCGCAAGGACCGTGACAATCATTTAGAGAGTCAGGATTATGATGATATGCGAGCTACTCTAACCAGTTTTTTGAAAGAATTGGAAGAACGATATCACCTTCACTTTGTTCATAAAAAGGACTTACTAAGACAACTTCTTACTCACTGCAAGGCACTCTTATATCGTAAACGTTATGGTATTTTTTCTGTTAATCCTTTAACAGAGCATATTAAAGACAAATATGAAGAACTTTTTGCCATAACCTCGTCTTCTGTAAAGCTTTTAGAGAAAGCTTGGCAAATCAAATTGACCGATGATGATGTAGCATATCTAACGATTCATTTAGGAGGGGAACTTCGTAATAGTCAACAATCTCCTAATAAACTTAAGTTAGTTATTGTATCTGATGAAGGAATAGCGATTCAGAAACTTCTTTTAAAGCAATGTCAACGCTACTTAACAAACAGTGATATAGAAGCTGTTTTTACAACCGAACAGTATCAAAGTGTGAGTGATCTTATGCATGTAGATATGGTTGTCTCTACTAGTGACGCTTTAGAATCTCGTTTTCCGATGTTAGTAGTTCACCCTGTTTTGACAGATGATGATATTATTCGCTTGATTCGCTTTTCTAAAAAAGGTAACTGTGCAAATAGTAATCAATTTACCAATGAACTTGAAAAAACGATTGCTCAATATGTCAAGGAAGATAGTGAACGCTACGTGCTGAAATCTAAGATTGAGAAACTTATTCATCAAGAATTGCTCCAAGACGTCCTTCCCCTTCAAAGTACAGTTTGT

SEQ ID NO: 21702 - protein, 559 aa, Streptococcus agalactiae; identical to SEQ ID NO: 16914

SEQ ID NO: 21703 - protein, 647 aa, Streptococcus agalactiae
TTGGAGATACGTCAAGAATTGCTTCAAGATCCAGATAGAGAGCTACCCGCTTTAAAAGCAGAGGCTGACTTTTATGATATCAATCTTTACTATAGTGCTAATGAAGACCTTATCAAAGGAGGGAAAGTTAATCCTTATCTTAATAAAGGCCTTAAAGAAGCATCACAGTTAGGAGCTCCTTTCATTAAGCTAAATGTTGGACAAACCAGAAACTTAAGTAAAGAAGAGTTAGAACCTCTTAAAGAGATATTGAAAAGCCAAACTATTGGTATAAAGGTGGAAAATAATCAAGACCCTAAAGCAGCTACAGTGGAGAATTGCCAATATTTTATGACTCTAGTGAAAGAATTACAAATACCAATAAGTTTTGTTTTTGATACTGCTAATTGGGCCTTTATCAACCAAGATCTATACCAAGCGGTAAATAGCTTAGCTTGTGATACCACCTACCTTCACTGTAAAAATTTTTTACAGGTAGCTGGAAAGCCTCACCTCTCGAAGAGCTCTTCGAAGGAGAGATTGATCTGACTGATTTGTTAAAGAGTTTCTCTAATTGTGAGTATCTAGCTCTAGAATACCCCACAGAGTTGGAGGTATTAAAAAGGGATGTTCAACGTTTAATCTCTATCAGCAATAGTCAAAACTTT

SEQ ID NO: 21704 - protein, 216 aa, Streptococcus agalactiae
  VARIANT 169: Xaa = Any Amino Acid
MEIRQELLQDPDRELPALKAEADFYDINLYYSANEDLIKGGKVNPYLNKGLKEASQLGAPFIKLNVGQTRNLSKEELEPLKEILKSQTIGIKVENNQDPKAATVENCQYFMTLVKELQIPISFVFDTANWAFINQDLYQAVNSLACDTTYLHCKNFLQVAGKPHLSKSXFEGEIDLTDLLKSFSNCEYLALEYPTELEVLKRDVQRLISISNSQNF

SEQ ID NO: 21705 - protein, 466 aa, Streptococcus agalactiae
ATGAAACAAGAAGATATTATTATCAATAGTATTGTATTCAAAAAACAGTTAGACAAAGGTTTTACACAAGTTCAGCTCATTAAGTTAGTAAAGGATTTAGGATTTTCACGATTTGAGATACGTCAAGAATTGCTTCAAGATCCAGATAGAGAGCTACCCGCTTTAAAGCAGAGGCTGACTTTTATGATATCAATCTTTACTATAGTGCTAATGAAGACCTTATCAAAGGAGGAAAGTTATCTTATCTTATAAAGGCCTTAAAGAAGCATCACAGTTAGGAGCTCCTTTCATTAAGCTAAATGTTGGACAAACCAGAAACTTAAGTAAAGAAGAGTTAGAAACTCTTAAAGAGATATTGAAAAGCCAAACTATTGGTATAAAGGTGGAAAATAATCAAGACCCTAAAGCAGCTACAGTGGAGAATTGCCAATTATTTATGACTCTAGTGGAAGATTTACAATACCCA

SEQ ID NO: 21706 - protein, 157 aa, Streptococcus agalactiae
MKQEDIIINSIVFKKQLDKGFTQVQLIKLVKDLGFSRFEIRQELLQDPDRELPALKAEADFYDINLYYSANEDLIKGGKVNPYLNKGLKEASQLGAPFIKLNVGQTRNLSKEELETLKEILKSQTIGIKVENNQDPKAATVENCQLFMTLVEDLQYP

SEQ ID NO: 21707 - protein, 1515 aa, Streptococcus agalactiae; identical to SEQ ID NO: 12271

SEQ ID NO: 21708 - protein, 505 aa, Streptococcus agalactiae; identical to SEQ ID NO: 12272

SEQ ID NO: 21709 - protein, 987 aa, Streptococcus agalactiae; identical to SEQ ID NO: 12273

SEQ ID NO: 21710 - protein, 329 aa, Streptococcus agalactiae; identical to SEQ ID NO: 3314

SEQ ID NO: 21711 - protein, 1449 aa, Streptococcus agalactiae
ATGCTAGAAGCTTTACATAAATTCTTTGAAGTTTTTGGTGCAGCAACTGTTGTACCCGCTATGATTTTTATTGTCAGCCTTTTTCTAAAGGTCAATCCAAGGCGAGCTTTCTTTAGCGCCTTACGAGCTGGTGTTGGACTCACAGGCTTTGGTTGGATTATATCAGCTTTTGCTCCTATGGTGACTAAGTATATCCAGCAGATGGTTAAAACTACTGGGCTCCATTTACCAATTGTAGATATTGGTTGGCAGGCTGGTTCTCTCACCGCCTTTTCTTCTGAGATTGGCCTCTCTTTCTTTGTTTTTGGCTTGCTAATTGAATTGGGGCTTTTCTTGCTCGGGATTACCCGAGTATTTGTCCCATCTAATCTTTGGAATAACTTTGGCTATATGATTTGGGGTACAATGGCCTATGCAGCAACAGGTAATTTTATATTGTCTTTCGCATTTATGGTTTTTGTCTTACTCTATTCATTAGTGATGTCAGAAGTATTGGCAGATCGATGGTCGGAGTATTACGGTGTTAAAAATGCAACGATCAACTCGATTCATAATATTGAAACCCTTATTCCAGCTCTTATTCTTGATCCTCTTTGGAACCTACTTGGTGTCAATAAGGTAAAGTTGAACCCAGAATCATTAAAGACTAAGTTAGGGATATTTGGTGAGCCAATGACACTTGGTTTTATACTTGGTGTGATTATTGGTGTATTAGGTAGTTTACGTAACCTTGCAAGTATTGATACTTGGGGAGGTATACTTGGTTTTGCAGTTGCTCTTGCAGCGGTTATGACTATTTTTCCTTTGATTACGGGGGTATTTGCTAGTGCTTTTGCTCCTCTTGCTGAAGCAGTTGAACGCAATAAGAAAAAAGAAAGTCAAGCTGAGCAAGGAGCACTGGATAAAAAACGTTGGTTTATTGCAGTAGATGACGGTGTTGGTTTTGGTGAACCAGCAACTATTATCGCAGGTCTCATTTTAGTACCAATAATGGTTGTTATTTCCTTGATTTTACCTGGAAATGAAGCTTTACCAGTCGTTGACCTTATTGCTATCCCTTTTATGATTGAAGCTATGATAGCTGTGTCAAAAGGAAATATTCTTAAAGCTATTTTGAATGGAATCATATGGTTTTCACTAGGTCTTTATGCTGCTAGTGCCCTAGGTCCAATCTACACAGAAGCTGTTAAGCATTTTGGAACTGCTTTACCAGCAGGGGTAACTTTGATTATGAGCTTTAATCTCCTAGCTCATCCTTTGACAGCTCTAGTCTTCTTTGCTTGGATATCTGGGAACCCACTCTATATTGGTGTGACAGTTGTTATTTATCTTGCTTTCTTGTTCTTGCTTCGTACTCGTCGTGAATCTATTTACGCATACCTTAAAACTATGGCTGATAAGAATAGCGGATATGAAGGTAGTTGTGAAAAAATCTTTATTGCTGAAGAT

SEQ ID NO: 21712 - protein, 483 aa, Streptococcus agalactiae
MLEALHKFFEVFGAATVVPAMIFIVSLFLKVNPRRAFFSALRAGVGLTGFGWIISAFAPMVTKYIQQMVKTTGLHLPIVDIGWQAGSLTAFSSEIGLSFFVFGLLIELGLFLLGITRVFVPSNLWNNFGYMIWGTMAYAATGNFILSFAFMVFVLLYSLVMSEVLADRWSEYYGVKNATINSIHNIETLIPALILDPLWNLLGVNKVKLNPESLKTKLGIFGEPMTLGFILGVIIGVLGSLRNLASIDTWGGILGFAVALAAVMTIFPLITGVFASAFAPLAEAVERNKKKESQAEQGALDKKRWFIAVDDGVGFGEPATIIAGLILVPIMVVISLILPGNEALPVVDLIAIPFMIEAMIAVSKGNILKAILNGIIWFSLGLYAASALGPIYTEAVKHFGTALPAGVTLIMSFNLLAHPLTALVFFAWISGNPLYIGVTVVIYLAFLFLLRTRRESIYAYLKTMADKNSGYEGSCEKIFIAED

SEQ ID NO: 21713 - protein, 954 aa, Streptococcus agalactiae; identical to SEQ ID NO: 12277

SEQ ID NO: 21714 - protein, 318 aa, Streptococcus agalactiae; identical to SEQ ID NO: 12278

SEQ ID NO: 21715 - protein, 129 aa, Streptococcus agalactiae
TTGGTTTCAGAATTAGTAGATGCAAAAGCAGCTTCTAGTAATGTCTTAGCTTTTGAAAAAGATGGAAAAGCTTATCTTTTCTCAGCCAATAACGGACGTGGCGAAGTTGCTCTTTATCAATTAGTAAAA

SEQ ID NO: 21716 - protein, 43 aa, Streptococcus agalactiae
MVSELVDAKAASSNVLAFEKDGKAYLFSANNGRGEVALYQLVK

SEQ ID NO: 21717 - protein, 611 aa, Streptococcus agalactiae
ATGAAGATTAATAAATTATTGTCAGACAGACTTGAAGCTTGTTATTCAGTTTGTCGTTTGCAAAATCAAGACTATGATTTTTTATTAGTAGCTTCAGAGGTTGATCAAGCCTGCTTTGCTTATGATTTGAATAGCGATTTAGCAAAAATTGTTGTTTGGGAAGATGTGGGAGGTACCATGAGTATTATTCCAATTCCCGGAACCATGGATTTTTTGGCAACCCAGAAATTTTACCCAGGGTTTAAGGCCAAAGATGTCAGGTTGTTTATGCAAGTTTTCAAGGAGATCATTGGGACATTTGTAACGCATTTGATTTTCGTATTTACATCGCTTTGATCTCATTAAAGGTAAAGAAAATCAACTTTACTTTATAGGTTGTACAATTGCTAACAGTAAAGCTACCTGAGGATTGGAGTGATAAAGGCCGAATTTTTGTTGCTCGTTTTAATACTCAAAACCATACATTGGAAGGATTGCAACAATTGCCTCAAACTTTATTAAAAAATCATGGATACTATGCCATTCAGGATGAAGGATATTCATTGATTACTTCAGTGGAAGGGGTATTCAAACTCACTTATCCAGAATTTTCTACTACAGGCGACTGGGCA

SEQ ID NO: 21718 - protein, 205 aa, Streptococcus agalactiae
MKINKLLSDRLEACYSVCRLQNQDYDFLLVASEVDQACFAYDLNSDLAKIVVWEDVGGTMSIIPIPGTMDFLATQKFYPGFKAKDCQVVYASFQGDHWDICNAFDFPYLHRFDLIKGKENQLYFIGCTIANSKAYTEDWSDKGRIFVARFNTQNHTLEGLQQLPQTLLKNHGYYAIQDEGYSLITSVEGVFKLTYPEFSTTGDWA

SEQ ID NO: 21719 - protein, 981 aa, Streptococcus agalactiae; identical to SEQ ID NO: 12281

SEQ ID NO: 21720 - protein, 327 aa, Streptococcus agalactiae; identical to SEQ ID NO: 12282

SEQ ID NO: 21721 - protein, 645 aa, Streptococcus agalactiae; identical to SEQ ID NO: 12283

SEQ ID NO: 21722 - protein, 215 aa, Streptococcus agalactiae; identical to SEQ ID NO: 3326

SEQ ID NO: 21723 - protein, 714 aa, Streptococcus agalactiae; identical to SEQ ID NO: 12285

SEQ ID NO: 21724 - protein, 238 aa, Streptococcus agalactiae; identical to SEQ ID NO: 12286

SEQ ID NO: 21725 - protein, 861 aa, Streptococcus agalactiae; identical to SEQ ID NO: 12287

SEQ ID NO: 21726 - protein, 287 aa, Streptococcus agalactiae; identical to SEQ ID NO: 12288

SEQ ID NO: 21727 - protein, 663 aa, Streptococcus agalactiae; identical to SEQ ID NO: 12289

SEQ ID NO: 21728 - protein, 221 aa, Streptococcus agalactiae; identical to SEQ ID NO: 3332

SEQ ID NO: 21729 - protein, 483 aa, Streptococcus agalactiae
ATGAATTTAAAACAAGCCTTTATCGAAAATGACTCAATTCGTCTTAAATTATCTGCAAGCGATTGGAAAGAAGCAATCAAATTATCAATTGATCCATTGATTGAAAGTGGTGCTGTTGATGCAGAATATTACGATGCCATTATTGAATCTACAGAGGAATTTGGTCCGTACTACATTCTTATGCCGGGTATGGCGATGCCTCATGCTCGTCCAGAAGCAGGCGTAAAACGTGATGCATTTTCATTAATTACATTAACAGAGTCAGTAGTCTTTCCAGATGGCAAAGAAGTCTCAGTATTGTTAGCACTTGCTGCAACAAGTTCAGCTATTCATACTTCTGTTGCTATCCCTCAAATTATTGCCCTTTTTGAATTGGAAAATTCAATCCAGCGCTTGACGGAATGCCAAGAAGCAAAAGAAGTCCTTGCAATGGTAGAGGAATCAAAAAACAGCCCATATTTAGAAGGTTTAGATTTAGAAAGC

SEQ ID NO: 21730 - protein, 161 aa, Streptococcus agalactiae; identical to SEQ ID NO: 12292

SEQ ID NO: 21731 - protein, 276 aa, Streptococcus agalactiae; identical to SEQ ID NO: 12293

SEQ ID NO: 21732 - protein, 92 aa, Streptococcus agalactiae; identical to SEQ ID NO: 3336

SEQ ID NO: 21733 - protein, 1437 aa, Streptococcus agalactiae; identical to SEQ ID NO: 12295

SEQ ID NO: 21734 - protein, 479 aa, Streptococcus agalactiae; identical to SEQ ID NO: 3338

SEQ ID NO: 21735 - protein, 613 aa, Streptococcus agalactiae
ATGCGTAAATTTTTCCAAGATGTTATTGTAGAGGTGGCTTATTATTTAGAGATTGCTTTGTCAGTTATTCTGGCAACAGCTATTATTTTCTTTAGTTTAGCACTCTTTCATGATTTGTTTAGCATGTTGTCTGTTGATCAAAATGTTGATAAGTTGTTCCAGACTTTCCTTGCTCGCGCCATGACAATAGCAGTCGGGATTGAGTTGATCAAAATGTTTTCAAAACCTTCCCCAGATACTTTAATTGAAGTGTTATTGTTTGCCTTAGCTCGTCAACTTGTAATTGAACATGGTAGTGTTTCAGATTACCTTATGGGGATTGCTTCAGTTGCTATTTTGTTTGCTGTTCGTAAATATCTTCACCCATTTTGATGGGTCAAGCAACATTGTTTTACGTGCTAATAACAAAGTCAAAAAAGCTAATATTTTAGCTAGGATTCAACTACCTTGTCAACCCAATGAAACTTTAGGAGACTTACTTGTTCGTCATTTAAATGATGAGGAAAAGGACGTTGCTATTGGTTCAGTAGTCTATATTAATAACGTTGCATTGCGTGTTGATAGTATGCACGATGGTCTTGTGACGCGTGTAGAAATCATTAGGAGTCTACAT

SEQ ID NO: 21736 - protein, 205 aa, Streptococcus agalactiae
  VARIANT 121: Xaa = Any Amino Acid
MRKFFQDVIVEVAYYLEIALSVILATAIIFFSLALFHDLFSMLSVDQNVDKLFQTFLARAMTIAVGIELIKMFSKPSPDTLIEVLLFALARQLVIEHGSVSDYLMGIASVAILFAVRKYLXTHFDGSSNIVLRANNKVKKANILARIQLPCQPNETLGDLLVRHLNDEEKDVAIGSVVYINNVALRVDSMHDGLVTRVEIIRSLH

SEQ ID NO: 21737 - protein, 119 aa, Streptococcus agalactiae
TTGATTCACAGTATCATGCACTTCTTTTTTTATCATTTACAGTAGTTTTGATTTCTGGGAAGTTCTTAAGTCTTATTAGTATCTATCTATTAAAAAGAAAAAGTAAACATCAAAAAGTC

SEQ ID NO: 21738 - protein, 41 aa, Streptococcus agalactiae
MIHSINALLFLSFTVVLLISGKFLSLISIYLLKRKSKHQKV

SEQ ID NO: 21739 - protein, 301 aa, Streptococcus agalactiae
GTGGTAGGTGTATGTAAAGCTTACACTAGCCGTGTTGGCGATGGCCATTCCCAACAGAACTTTTTGATGAGGTTGGTGACCGTATTCGTGAGATTGGTAAAGAGTATGGTACAACGACTGGTCGTCCTCGTCGCGTTGGATGGTTTGATTCTGTTGTTATGCGTCACAGCCGTCGAGTATCAGGTATTACTAACCTCTCTCTGAATTCAATTGATGTTCTTTCAGGGCTTGATACGGTAAAAATTTGTGTGGCTTATGACCGTGGGAAACGTATTGACTATTACCCAGCAAGCTTGAACAG

SEQ ID NO: 21740 - protein, 102 aa, Streptococcus agalactiae
  VARIANT 102: Xaa = Any Amino Acid
MVGVCKAYTSRVGDGPFPTELFDEVGDRIREIGKEYGTTTGRPRRVGWFDSVVMRHSRRVSGITNLSLNSIDVLSGLDTVKICVAYDLMGNVLTITQQALNX

SEQ ID NO: 21741 - protein, 779 aa, Streptococcus agalactiae
ATGACTTCAGTTGTTGTAGTAGGTACCCAATGGGGTGACGAAGGTAAAGGTAAAATTACAGATTTTTTATCTGCTGACGCAGAAGTAATTGCACGTTATCAAGGTGGTGATAACGCTGGGCATACTATCGTTATTGATAACAAAAAATTTAAACTTCATTTAATTCCTTCAGGAATTTTCTTCAAAGAAAAAATTTCTGTCATTGGTAATGGTGTTGTCGTTAATCCGAAATCATTAGTTAAAGAGTTAGCTTATCTTCACGGAGAAGGTGTAACAACGGATAACCTTCGTATTTCAGATCGTGCGCATGTTATCTTGCCATACCACATCAAGCTTGACCAACTACAAGAAGATGCTAAAGGTGATAATAAAATTGGAACAACCATCAAAGGAATTGGGCCAGCTTACATGGACAAGGCTGCGCGTGTCGGTATCCGTATTGCTGACCTTCTTGATAGAGAAGTTTTTGCTGAGCGTTTGAAAATTAATTTAGCTGAGAAAAATCGTTTATTTGAAAAAATGTATACAGTACACCTCTTGAATTTGATGATATTTTCGAAGAATATTAGAATATGGTCAACAAATTAAGCAATATGTGACTGATACATCCGTTATCTTAAATGATGCTCTTGATGCCGGTAAACGTGTTCTTTTTGAAAGAGCACAAGGAGTTATGCTCGACATTGATCAAGGATCATACCCATTTGTAACATCTTCCAATCCAGTAGCAGGTGGTGTCACAATTGGTTCGGGAGTTGCCAGTAAAATTAATAAAGTGG

SEQ ID NO: 21742 - protein, 261 aa, Streptococcus agalactiae
MTSVVVVGTQWGDEGKGKITDFLSADAEVIARYQGGDNAGHTIVIDNKKFKLHLIPSGIFFKEKISVIGNGVVVNPKSLVKELAYLHGEGVTTDNLRISDRAHVILPYHIKLDQLQEDAKGDNKIGTTIKGIGPAYMDKAARVGIRIADLLDREVFAERLKINLAEKNRLFEKMYDSTPLEFDDIFEEYYEYGQQIKQYVTDTSVILNDALDAGKRVLFERAQGVMLDIDQGSYPFVTSSNPVAGGVTIGSGVDQVKLIKW

SEQ ID NO: 21743 - protein, 1020 aa, Streptococcus agalactiae
ATGAATATCATTATTGGGACCAGTCTTTTAATACTTGTATTAGCGATTTTCACTTTATTTAATTATAAAGCACCCTACGGAACAAAAGCAATGGGAGCATTGGCATCTGCGGCTTGTGCATCCTTCCTTGTAGAAGCTTTTCAAGATTCTTTCTTTGGTAAAGTTTTGGGATTTCAATTTTTAAGTGAAGTGGGTGGTGCTAATGGTTCACTTTCTGGTGTAGCTGCAGCTATATTGGTTACTATTGCTATTGGTGTAACCCCAGGATACGCAGTTTTAATTGGTTTATCTGTTTCTGGAACAGGTATTATTCCTGGTTTCCTTGCAGGATATTTAGTGGGATTTCTTGTTAAGTGGATGGAAAGAAATATTCCTGGTGGTTTAGATCTTATTTCAATTATTATTATTGGTGCACCATTAACACGTCTTGTGGCCAAACTGTTGACGCCGCTTATTAATAGCACTTTGCTCACCATTGGAGATATCTTAACATCAGGTGCTCATAGCAACCCTATTTTAATGGGGATTATACTTGGCGGGACAATTGTAGTAGTGGCGACAGCACCACTTTCTTCTATGGCATTGACAGCTATGCTAGGATTAACCGGAATGCCTATGGCTATAGGAGCCTTGTCTGTCTTTGGTTCGTCATTTATGAATGGTGTACTTTTCCATAAATTAAAACTTGGAAGTCGTAAAGATAATATAGCTTTTGCTGTTGAGCCTCTAACTCAAGCTGACGTGACTTCAGCTAACCCTATTCCAATCTATGTCACTAATTTTGTTGGTGGTGCAGCTTGTGGTATTTTAATTGCCTTGATGAAATTAGTTAATGATACTCCTGGAACAGCGACACCAATTGCAGGATTTGCTGTCATGTTTGCCTATAACCCAATGATAAAAGTACTAATAACCGCTCTAGGTTGTATTATCCTATCTTTACTAGCAGGCTATTTTGGAGGCATTGTTTTTAAAGATTATAAATTAGTTACAAAAGAAGAGCTACAGGCTAGAGATAAC

SEQ ID NO: 21744 - protein, 340 aa, Streptococcus agalactiae; identical to SEQ ID NO: 12306

SEQ ID NO: 21745 - protein, 447 aa, Streptococcus agalactiae
ATGGATAAAGAAAAATTAGACTATTGGAAGACGATAATAACGTTTCTCCATAATGTTTTAGGTGATAATTACGAAATTGTTTTGCATGTAGTAGATGAAAATGATATCTATATTGGTGAGTTGGTTAATAGTCACATTAGTGGACGAACCATAAGTTCACCTCTAACGACTTTCGCCCTTGATTTAATCAAGAATAAAGTTTATAAGGAAAAAGATTTTGTTACTAACTATAAGGCGATTGTCAGCCCTCTCAATAAAGAAGTTCGTGGATCTACTTTCTTCATCAAGAATGCTCAAAATGAACTTGAAGGGATGTTATGTATCAACCTTGATATTTCTGCATACCAAAATATTGCTTTGGATATTCTGGACTTAGTTAATTTAAATGTTAACAAAATACTACTTAAGTCCCCTCAAAAAATTTCTCTCCCTCACAGGAGGAACCTG

SEQ ID NO: 21746 - protein, 149 aa, Streptococcus agalactiae
MDKEKLDYWKTIITFLHNVLGDNYEIVLHVVDENDIYIGELVNSHISGRTISSPLTTFALDLIKNKVYKEKDFVTNYKAIVSPLNKEVRGSTFFIKNAQNELEGMLCINLDISAYQNIALDILDLVNLNVNKILLKSPQKISLPHRRNL

SEQ ID NO: 21747 - protein, 2248 aa, Streptococcus agalactiae
GTGATTATCGATCAACTGTTACAAAGAAGCCACTCTCATCTACCGATTCTACAAGCTACATTTGGCTTAGAGAGAGAAAGCCTTCGCATTCACCAACCCACTCAAAGGGTTGCTCAAACACCCCATCCCAAAACATTAGGGAGTCGTAACTATCATCCTTATATCCAAACGGATTATAGTGAACCTCAATTAGAACTCATTACACCTATTGCAAAGGATAGCCAAGAAGCCATTCGATTTTTGAAAGCTATAAGTGATGTTGCTGGACGCTCTATCAACCACGATGAATACTTATGGCCGCTTTCTATGCCACCCAAAGTGAGGGAAGAAGACATACAGATTGCCCAATTAGAGGATGCTTTTGAATATGATTATCGCAAATATTTGGAGAAAACTTATGGAAAACTAATACAATCCATCTCTGGAATTCACTATAATCTCGGTTTAGGTCAAGAGTTATTAACTTCTCTCTTTGAATTGAGTCAAGCAGACAATGCTATTGATTTTCAGAACCAGCTTTACATGAAATTGTCTCAAAATTTTTTACGTTACCGTTGGTTACTAACTTATCTATATGGAGCGAGCCCGGTAGCTGAAGAAGACTTTTTAAATCAGAAACTGAATAACCCTGTTCGGTCACTTAGAAATAGTCACTTAGGTTATGTGAATCATAAAGATATTCGTATTTCTTATACTAGCTTGAAGGATTATGTCAACGATCTAGAAAATGCTGTAAAAAGTGGGCAATTGATTGCTGAGAAAGAATTTTATTCACCTGTTCGTCTCCGTGGTAGTAAGGCCTGTCGTAATTATTTAGAAAAAGGAATTACATATTTAGAATTTCGCACTTTTGATCTCAACCCATTTAGTCCAATCGGTATAACGCAGGAAACTGTTGATACTGTTCACCTTTTCTTATTGGCGCTTTTGTGGATAGATTCTAGTAGTCATATTGACCAAGATATCAAGGAAGCCAATAGATTAAATGACCTTATAGCACTCAGTCATCCATTAGAAAAATTACCTAATCAAGCACCAGTTTCTGACTTAGTGGATGCTATGCAATCTGTTATCCAACATTTTAACTTACCACCTCACTATCAAGACCTATTGGAATCTGTAAAAAGGCAAATTCAGTCACCTGAATTAACGGTAGCTGGTCAACTTTTAGAAATGATTGAAGGACTTTCCTTAGAAACATTTGGACAAAGACAAGGACAAATTTATCACGATTATGCTTGGGAAGCTCCCTACGCCTTAAAGGGATATGAAACGATGGAACTTTCTACCCAATTGCTACTATTTGACGTTATCCAAAAAGGAGTCAACTTCGAAGTGCTGGATGAACAAGATCAATTCCTAAAATTATGGCACAATAGTCATATTGAGTACGTTAAAAATGGTAATATGACCTCAAAAGATAACTATATTGTACCGCTCGCTATGGCTAACAAAGTTGTTACAAAAAAAATCCTAGATGAAAAGCATTTCCCAACTCCTTTTGGAGATGAATTTACTGACCGTAAAGAGGCACTTAACTATTTTTCACAAATCCAAGATAAACCAATCGTCGTTAAGCCAAAATCAACAAACTTTGGTTTAGGCATTTCTATTTTTAAAACATCAGCTAACTTAGCTTCTTATGAAAAAGCAATTGACATCGCTTTTGCCGAAGATAGTGCTATTCTTGTGGAAGAATATATTGAGGGTACCGAATACCGTTTCTTCGTCCTTGAGGGGGACTGTATTGCTGTATTGCTTAGGGTAGCAGCTAATGTCGTTGGAGATGGTATTCATACTATTAGTCAGCTAGTTAAACTTAAAAACCAAAACCCTCTCAGAGGCTATGATCATCGCTCTCCTCTAGAGGTTATTGAGCTCGGAGAAGTAGAACAGTTAATGTTGGAACAACAAGGATACACTGTTAACAGTATCCCTCCAGAAGGAACAAAAATAGAACTTCGCCGTAATTCTAATATTTCCACTGGCGGTGACTCTATAGATGTAACAAATACGATGGATCCTACATATAAACAACTAGCAGCTGAGATGGCAGAGGCTATGGGGGCTTGGGTTTGTGGAGTTGATTTAATTATTCCTAATGCCACTCAAGCATACTCAAAAGATAAGAAAAATGCTACTTGCATTGAACTAACTTTAACCCATTGATGTATATGCACACCTACTGTCAAGAGGGGCCTGGCAATCTATTACACCTCGAATTTTGGCTAAACTGTTCCCAGAATTA

SEQ ID NO: 21748 - protein, 750 aa, Streptococcus agalactiae
  VARIANT 719: Xaa = Any Amino Acid
MIIDQLLQRSHSHLPILQATFGLERESLRIHQPTQRVAQTPHPKTLGSRNYHPYIQTDYSEPQLELITPIAKDSQEAIRFLKAISDVAGRSINHDEYLWPLSMPPKVREEDIQIAQLEDAFEYDYRKYLEKTYGKLIQSISGIHYNLGLGQELLTSLFELSQADNAIDFQNQLYMKLSQNFLRYRWLLTYLYGASPVAEEDFLNQKLNNPVRSLRNSHLGYVNHKDIRISYTSLKDYVNDLENAVKSGQLIAEKEFYSPVRLRGSKACRNYLEKGITYLEFRTFDLNPFSPIGITQETVDTVHLFLLALLWIDSSSHIDQDIKEANRLNDLIALSHPLEKLPNQAPVSDLVDAMQSVIQHFNLPPHYQDLLESVKRQIQSPELTVAGQLLEMIEGLSLETFGQRQGQIYHDYAWEAPYALKGYETMELSTQLLLFDVIQKGVNFEVLDEQDQFLKLWHNSHIEYVKNGNMTSKDNYIVPLAMANKVVTKKILDEKHFPTPFGDEFTDRKEALNYFSQIQDKPIVVKPKSTNFGLGISIFKTSANLASYEKAIDIAFAEDSAILVEEYIEGTEYRFFVLEGDCIAVLLRVAANVVGDGIHTISQLVKLKNQNPLRGYDHRSPLEVIELGEVEQLMLEQQGYTVNSIPPEGTKIELRRNSNISTGGDSIDVTNTMDPTYKQLAAEMAEAMGAWVCGVDLIIPNATQAYSKDKKNATCIELXFNPLMYMHTYCQEGPGQSITPRILAKLFPEL

SEQ ID NO: 21749 - protein, 348 aa, Streptococcus agalactiae
TTGGAACAACAAGGATACACTGTTAACAGTATCCCTCCAGAAGGAACAAAAATAGAACTTCGCCGTAATTCTAATATTTCCACTGGCGGTGACTCTATAGATGTAACAAATACGATGGATCCTACATATAAACAACTAGCAGCTGAGATGGCAGAGGCTATGGGGGCTTGGGTTTGTGGAGTTGATTTAATTATTCCTAATGCCACTCAAGCATACTCAAAAGATAAGAAAAATGCTACTTGCATTGAACTAAACTTTAACCCATTGATGTATATGCACACCTACTGTCAAGAGGGGCCTGGTCAATCTATTACACCTCGAATTTTGGCTAAACTGTTCCCAGAATTA

SEQ ID NO: 21750 - protein, 116 aa, Streptococcus agalactiae
MEQQGYTVNSIPPEGTKIELRRNSNISTGGDSIDVTNTMDPTYKQLAAEMAEAMGAWVCGVDLIIPNATQAYSKDKKNATCIELNFNPLMYMHTYCQEGPGQSITPRILAKLFPEL

SEQ ID NO: 21751 - protein, 816 aa, Streptococcus agalactiae; identical to SEQ ID NO: 12315

SEQ ID NO: 21752 - protein, 272 aa, Streptococcus agalactiae; identical to SEQ ID NO: 12316

SEQ ID NO: 21753 - protein, 154 aa, Streptococcus agalactiae
ATGAGCGATACCTTTAATTTTGATATTGACCAAATTGCAGACAATGCTATCACTAAAACAGATAAAACAACAGAAATTATTTCCAACCAGACAACAAGCCAACTGGGCAAATTGCCTTTTTTGAAAACTAACACAGCACAAAGTCTGCTATCTC

SEQ ID NO: 21754 - protein, 52 aa, Streptococcus agalactiae
  VARIANT 34: Xaa = Any Amino Acid
MSDTFNFDIDQIADNAITKTDKTTEIISNQTTSXTGQIAFFEKLTQHKVCYL

SEQ ID NO: 21755 - protein, 339 aa, Streptococcus agalactiae
ATGATACGCATTGCTCCGGAATTAAAACCGTTCTATCACAATATTCAAGATGACCACTATGCTATCTTAAAAAAGATTGAAAAGGCAGATAACAAAGCTGAATTAGCAGCAATTCATCAAGCCAATATGAAACGTTTTACAGATGTTCTGGCTGGCTACATCAGAATCAAACAATCTCCTAAAAATTTTAACAATGCTAAGGAACGCCTAGAACAAGCATTACAAGCAATTAAAAAATTTAATTTAGATTTAGATGAAACGCTGCGCCAATTGAATGAAAGTGATATGAAAGATTTTGACGTTAGCCTAAGAATGATGCAAGACGAAAGGAACAATAAA

SEQ ID NO: 21756 - protein, 113 aa, Streptococcus agalactiae
MIRIAPELKPFYHNIQDDHYAILKKIEKADNKAELAAIHQANMKRFTDVLAGYIRIKQSPKNFNNAKERLEQALQAIKKFNLDLDETLRQLNESDMKDFDVSLRMMQDERNNK

SEQ ID NO: 21757 - protein, 1254 aa, Streptococcus agalactiae
ATGAGCGATACCTTTAATTTTGATATTGACCAAATTGCAGACAATGCTATCACTAAAACAGATAAAACAACAGAAATTATTTCCAACCAGACAACAAGCCAAACTGGGCAAATTGCCTTTTTTGAAAAACTAACACCAGCACAAAAGTCTGCTATCTCTGAAAAAACACCAGCTTTGGTAGATACTTTTGTCGGTGACCAAAATGCGCTCCTTGATTTTGGACAATCCGCAGTAGAAGGCGTTAATACCACTGTTAATCATATCTTGTCTGAGCAGAAAAAAATTCAAATTCCTCAAGTTGATGATTTACTAAAAAATGCTAATCGCGAACTAAATGGATTTATTGCCAAATATAAAGATGCTACTCCGGCAGAATTAGAGAAAAAACCAAACTTGATTCAAAAATTATTCAAACAAAGCAAGACCTCGCTACAGGAATTTTATTTTGACTCACAAAACATCGAGCAAAAAATGGATATGATGGCAGCGAATGTTGTCAAACAAGAAGATACTTTGGCAAGAAATATCGTCTCTGCTGAAATGCTCATTGAAGATAATACTAAATCTATTGAAAATTTGGTTGGAGTTATTGCTTTTATTGAATCGAGTCAAGCCGAGGCTGCCAATCGTGCAAGCCACTTACAACAAGAAATTCTAGCATTAGATAGCCAAACGTCCGAGTATCAAATTAAAAGTAACCAATTAGCTCGAATGACTGAAGTTATCAATACCCTCGAACAGCAACATACTGAATATGTCAGCCGTCTCTACGTTGCATGGGCAACAACACCACAGATGCGAAACTTGGTCAAAGTATCGTCAGATATGCGTCAAAAACTTGGCATGTTACGTCGAAATACCATTCCAACAATGAAACTCTCAATCGCTCAGTTAGGCATGATGCAACAATCTGTCAAATCCGGTGTCACTGCTGATGCTATTGTCAACGCTAATAATGCAGCATTGCAGATGCTGGCTGAAACTAGTAAAGAAGCGATTCCGATGTTAGAGAAGACCGCACAAAGCCCCACTGTTTCTATTAAATCTGTCACTGCATTATCTGAAAGCTTAGTGGCTCAAAATAATGGTATTATCGCTGCCATAGACAAAGGACGTAAAGAACGTGCCCAATTAGAATCTGCTGTTATTAAATCGGCTGAAACAATCAATGATTCTGTCAAAATTCGTGATAAAAAAATAGTTGAAGCCTTACTCAACGAAGGTAAATCTACCCAAGAAAAAGTTGATGAGTCT

SEQ ID NO: 21758 - protein, 418 aa, Streptococcus agalactiae
MSDTFNFDIDQIADNAITKTDKTTEIISNQTTSQTGQIAFFEKLTPAQKSAISEKTPALVDTFVGDQNALLDFGQSAVEGVNTTVNHILSEQKKIQIPQVDDLLKNANRELNGFIAKYKDATPAELEKKPNLIQKLFKQSKTSLQEFYFDSQNIEQKMDMMAANVVKQEDTLARNIVSAEMLIEDNTKSIENLVGVIAFIESSQAEAANRASHLQQEILALDSQTSEYQIKSNQLARMTEVINTLEQQHTEYVSRLYVAWATTPQMRNLVKVSSDMRQKLGMLRRNTIPTMKLSIAQLGMMQQSVKSGVTADAIVNANNAALQMLAETSKEAIPMLEKTAQSPTVSIKSVTALSESLVAQNNGIIAAIDKGRKERAQLESAVIKSAETINDSVKIRDKKIVEALLNEGKSTQEKVDES

SEQ ID NO: 21759 - protein, 873 aa, Streptococcus agalactiae; identical to SEQ ID NO: 12319

SEQ ID NO: 21760 - protein, 291 aa, Streptococcus agalactiae; identical to SEQ ID NO: 12320

SEQ ID NO: 21761 - protein, 975 aa, Streptococcus agalactiae; identical to SEQ ID NO: 12321

SEQ ID NO: 21762 - protein, 325 aa, Streptococcus agalactiae; identical to SEQ ID NO: 12322

SEQ ID NO: 21763 - protein, 639 aa, Streptococcus agalactiae
ATGTTGATTGTTTTAGCTGGAACCATTGGAGCAGGTAAAAGCTCCCTTGCAGCTGCTCTAGGACAACACCTAGGGACAGATGTTTTCTATGAGGCGGTTGATAATAACCCAGTTTTAGATCTTTACTATCAAGATCCCAAAAAATATGCTTTTTTACTACAAATATTCTTTTTAAATAAACGATTCCAATCTATAAAAGAAGCCTATAAGGCTAACAACAATGTTTTGGATCGTTCTATTTTTGAAGATGAACTATTCCTCACTCTAAATTATAAGAATGGAAATGTGACTAAAACAGAGCTAGATATCTATAAAGAACTTCTTGCAAATATGTTGGAAGAATTAGAAGGTATGCCTAAGAAGAGACCTGATTTGCTAGTCTACATTGATGTTTCATTTGATAAAATGTTAGAACGTATTGACAAACGAGGACGCAGCTTTGAGCAAGTTGATTCTAACCCAGAATTATACGACTACTACAAACAAGTCCATTCTAAATATCCAGAATGGTATGAAAATTACGACGTTTCACCTAAAATTCGGATCGATGGTAACAAACTTGATTTCGTCAAAAATCCAGAGGATCTTCAACACGTCCTTGACACTATTGATTCCGAATTGCAAAAACTTGATTTACTA

SEQ ID NO: 21764 - protein, 213 aa, Streptococcus agalactiae
MLIVLAGTIGAGKSSLAAALGQHLGTDVFYEAVDNNPVLDLYYQDPKKYAFLLQIFFLNKRFQSIKEAYKANNNVLDRSIFEDELFLTLNYKNGNVTKTELDIYKELLANMLEELEGMPKKRPDLLVYIDVSFDKMLERIDKRGRSFEQVDSNPELYDYYKQVHSKYPEWYENYDVSPKIRIDGNKLDFVKNPEDLQHVLDTIDSELQKLDLL

SEQ ID NO: 21765 - protein, 489 aa, Streptococcus agalactiae; identical to SEQ ID NO: 12325

SEQ ID NO: 21766 - protein, 163 aa, Streptococcus agalactiae; identical to SEQ ID NO: 12326

SEQ ID NO: 21767 - protein, 2445 aa, Streptococcus agalactiae; identical to SEQ ID NO: 12327

SEQ ID NO: 21768 - protein, 815 aa, Streptococcus agalactiae; identical to SEQ ID NO: 12328

SEQ ID NO: 21769 - protein, 462 aa, Streptococcus agalactiae
GTGGCCATAAAAAATACTTCCGATAATATTGAAGAATATATAAAATCATTATTAGAACAATCAGGAATTGCTGAAATAAAGCGTTCCAATTTAGCTGATACTTTTCAAGTTGTTCCTAGTCAGATTAATTATGTCATTAAGACACGGTTTACTGAAAGCCGTGGTTATGTGGTTGAGAGTAAACGAGGTGGTGGAGGTTACATCCGCATTGCTAAGGTTCATTTTTCTGATCAACACCAATTATTTGGAAATATGTTATCAACGATTGGCGAGCGTATCAGTGAACAAGTCTTTGATGATTTGATTCAATTATTATTCGATGAAGAGATAATTACAGAACGTGAAGGAAATTTGATTCTGGCGACATCAGGTGATGACGTCTTAGGAGAGCAAGCTTCTGTTATTAGAGCTCGTATGCTCCGTAAATTATTACAACGATTAGATAGAAAAGGATTCCATTTA

SEQ ID NO: 21770 - protein, 154 aa, Streptococcus agalactiae; identical to SEQ ID NO: 3368

SEQ ID NO: 21771 - protein, 399 aa, Streptococcus agalactiae; identical to SEQ ID NO: 12331

SEQ ID NO: 21772 - protein, 133 aa, Streptococcus agalactiae; identical to SEQ ID NO: 3370

SEQ ID NO: 21773 - protein, 1038 aa, Streptococcus agalactiae; identical to SEQ ID NO: 12333

SEQ ID NO: 21774 - protein, 346 aa, Streptococcus agalactiae; identical to SEQ ID NO: 3372

SEQ ID NO: 21775 - protein, 768 aa, Streptococcus agalactiae; identical to SEQ ID NO: 12335

SEQ ID NO: 21776 - protein, 256 aa, Streptococcus agalactiae; identical to SEQ ID NO: 12336

SEQ ID NO: 21777 - protein, 555 aa, Streptococcus agalactiae
ATGTCATTAGTCGGAAAAGAATTATTGAATTTTCAGCTCAAGCTTATCACGATGGAAAATTCATCACTGTTACAAATGAAGACGTTAAAGGAAATGGGCAGTTTTTTGTTTCTACCAGCAGACTTTTCATTTGTTTGCCCAACTGAACTTGGTGACCTTCAAGAGCAATACGAAACACTTAAATCTCTTGATGTAGAAGTTTATTCTGTCTCTACTGATACTCATTTTGTTCATAAAGCATGGCATGATGACTCAGATGTCGTTGGTACTATCACATATCCTATGATTGGTGACCCTTCACACCTTATTTCACAAGGTTTTGATGTCCTTGGACAAGATGGTCTAGCACAACGTGGTACATTTATCATTGATCCAGACGGTGTCATCCAAATGATGGAAATTAATGCTGATGGCATCGGACGTGATGCAAGTACTCTCATTGATAAAGTCCGTGCTGCTCAATACATCCGCCAACATCCAGGTGAAGTTTGTCCAGCTAAATGGAAAGAAGGAGCTGAAACTTTAACTCCTAGTTTAGACCTTGTAGGTAAAATT

SEQ ID NO: 21778 - protein, 186 aa, Streptococcus agalactiae
  VARIANT 40: Xaa = Any Amino Acid
MSLVGKEIIEFSAQAYHDGKFITVTNEDVKGKWAVFCFYXADFSFVCPTELGDLQEQYETLKSLDVEVYSVSTDTHFVHKAWHDDSDVVGTITYPMIGDPSHLISQGFDVLGQDGLAQRGTFIIDPDGVIQMMEINADGIGRDASTLIDKVRAAQYIRQHPGEVCPAKWKEGAETLTPSLDLVGKI

SEQ ID NO: 21779 - protein, 1530 aa, Streptococcus agalactiae; identical to SEQ ID NO: 12339

SEQ ID NO: 21780 - protein, 510 aa, Streptococcus agalactiae; identical to SEQ ID NO: 3378

SEQ ID NO: 21781 - protein, 2067 aa, Streptococcus agalactiae
ATGGAAGAAACTATTCTAATAGTCAGCTTTCTCCTGTTTTTGATTTTATCTAATGTTATCAATAGGATATTTCCTAAATTACCATTACCATTTATCCAGTTGGTCTTTGGGATTCTCTCTGGCTTAGTTTTTCATAAGTCACAAGTCCATATCGATCCTGAGTTATTTCTTGCCTTTGTTATTGCCCCTTTGAACTTTAGAGAAGGTCAAGAAAGTGATATTGGTAGTTTTATAAAGTATCGGACTATTATTCTTTACTTAATCTTACCAACGGTATTTTTAACAGCTATTGTCGTTGGTTATGTAGCAGGGCACCTTTTGCCAGTTAGTTTACCACTTGCGGCATGCTTTGCGCTTGGAGCAGCCTTAGGTCCAACAGATGCCGTTGCCTTTATATCGATTGCTAAGAGGTTTCAATTTCCTAAACGAGCAGAGAATATCCTCAAATTGGAAGGTCTTTTAAATGACGCTAGTGGTCTAGTTTCCTTCCAGTTTGCTTTAACAGCCCTTTTAACAGGTTATTTTTCCTTAACAAAAGCTAGTCTCAAGTTAGCATTGGCCATAATGGGTGGTTTTTTAATTGGCTTGCTTTTTGCTTTTCTAACGAGGTTATGTCTCACTGTCCTAGAGAAATTTGATGCTGCTGATGTTACAGGGGCTCTACTTTTGGAATTAACCTTACCTTTTGTTGCTTATTTCGTTGCTGATTTGTTGGGATTTTCAGCTATTATTGCGGTGGTAGTGGCAGGAGTAATGCAAGCAAATCGTTTGAAAAAAGTGACTCTCTTTGATGCTCAAGTAGATCGCGTTACCTCTGTTATTTGGGAAACCTTAAATTTTATTTTAAATGGTTTAGTTTTCTTAATATTTGGAAGAGAACTGACACGTATCATTGGTCCTCTTTTAACAAGTAACGCTTATAGTAATTTTGATCTTATTAGTATTGTTGTTTTAGTTACTTGCACACTTTTTCTAGTTCGCTTTCTAGCAGTTTCTTGCTTTTATGCTTGGAGATCTTTCAAATACCATAAATCATTTAAAAAGTATTGGAGAGAGATTCAACTGTTGACTTTTTCAGGAGTTAAAGGAAGTGTTTCCATAGCAACAATACTCTTATTACCCAAGCACTCAGTCATAGGAGAGTTGGGGTATAGTTTGATTCTTTTCACTGTTGGTGCAGTAACACTAATGAGTTTTTTAACGGGACTTTTAGTATTACCAAAGTTAGCGCCTCCCTTACAGGTGAAAGATGATTATTTAATACGTCTATCGATTTTAACAAAAGTATTATCTGTCTTAGAAGAAGACGGTAAGAGTTCTGAAAATCAAGCTTCATTTTATGCAGTTATAGATAATTATAATAGCCGTATTCGTCATCTCATTTTAGAACAAGAATCTAGTGACATTAAGAAGGACTTAGCTGAATTGCAACTGATGATGCTTAGTATAGAAAGCGACGGGCTTGAAGCTGCTTATCGTTATGGCAATATTTCTATCAAAGAATATCGTATTTACCAGCGTTATTTAAAATACTTAGAACGTCAAGTTAATCGTAGCTTTGTGTCAAATATCACTTATAGTTTAACGATTCTTATGCGTGTTATTCGTGGTATTGTTCATGAGTTTTTAACATTTGGACAAGGAATACGAAATCGGAAAAAACATTTCAAAAATAGGAAACGGTTGCTAGCAGAAGTCAATCGTCAGCACTTAACAGATTTGTACTTATCAAATAATGATCTCATTTTAGAAACGCTAGAAGATATGGAAGGTTATTATAATGCAACTTTGATAGATTTCTTACAAAATGAACGCATTCGAGACGCAGAATTAATTAAATCAGGTTTATTTGTAGAACGTGTCATTGCACGCATAACGCCAGATATTTTAAATGAAACCCTAAGAGGATATTACTTGGAACGCAGAACAATCTCTGAATTTGAAAGGGACGGTTTAATTAGTTCTAAAGAGTCTCAAATTTTAAGGGATAATGTCAATGAATTAGAAAGCTATTCATTAAGAGATAGTCAATCTTCTATACCTTATCAATTATTGGATTTAAAAAAA

SEQ ID NO: 21782 - protein, 689 aa, Streptococcus agalactiae
MEETILIVSFLLFLILSNVINRIFPKLPLPFIQLVFGILSGLVFHKSQVHIDPELFLAFVIAPLNFREGQESDIGSFIKYRTIILYLILPTVFLTAIVVGYVAGHLLPVSLPLAACFALGAALGPTDAVAFISIAKRFQFPKRAENILKLEGLLNDASGLVSFQFALTALLTGYFSLTKASLKLALAIMGGFLIGLLFAFLTRLCLTVLEKFDAADVTGALLLELTLPFVAYFVADLLGFSAIIAVVVAGVMQANRLKKVTLFDAQVDRVTSVIWETLNFILNGLVFLIFGRELTRIIGPLLTSNAYSNFDLISIVVLVTCTLFLVRFLAVSCFYAWRSFKYHKSFKKYWREIQLLTFSGVKGSVSIATILLLPKHSVIGELGYSLILFTVGAVTLMSFLTGLLVLPKLAPPLQVKDDYLIRLSILTKVLSVLEEDGKSSENQASFYAVIDNYNSRIRHLILEQESSDIKKDLAELQLMMLSIESDGLEAAYRYGNISIKEYRIYQRYLKYLERQVNRSFVSNITYSLTILMRVIRGIVHEFLTFGQGIRNRKKHFKNRKRLLAEVNRQHLTDLYLSNNDLILETLEDMEGYYNATLIDFLQNERIRDAELIKSGLFVERVIARITPDILNETLRGYYLERRTISEFERDGLISSKESQILRDNVNELESYSLRDSQSSIPYQLLDLKK

SEQ ID NO: 21783 - protein, 234 aa, Streptococcus agalactiae; identical to SEQ ID NO: 12343

SEQ ID NO: 21784 - protein, 78 aa, Streptococcus agalactiae; identical to SEQ ID NO: 12344

SEQ ID NO: 21785 - protein, 951 aa, Streptococcus agalactiae
ATGAAAAAATTAACAAAAGGCAGCCACATTCGTGTTCTTAGTCCCTCTTCTTCCATTGAACGTCTGGGTGGTTTTGAGGCTAACCTATTAGCCAAAGAAGTACTAGAAAAGCTGGGATTTCAAGTGTCATTCTCTAAGCACTATCTAGAAAATGATATCCTCTATTCTGCTTCGATTGCTAGCCGCATAGAAGATTTACATGAAGCATTTGCCGACCCTTCTGTTGATGCCATATTAGCAACCATTGGCGGATTCAATTCCAACGAGCTTTTACCATATTTAGATTATGATTTAATCTCTAAGAATCCCAAAATAATTTGTGGTTACTCAGATTCAACGGCATTCCTTAATGCTATTTTTGCTAAAGCAAAAATCCAAACTTACATGGGTCCTGCTTATTCTTCTTTCAAAATGAAGGAAGGTCAACCTTACCAAACACAAACTTGGCTTACTGCCATGACAGAAAACCACTATGAACTTTGGCCTAGTGAAGAATGGTCTAGTGATCCCTGGTATGATCCCAGCAAACCACGCCAATTTTTCCCAACAGAATGGAAAATTTATAATCACGGAAAAGCTTCCGGTACGATTATCGGAGGTAATCTCTCTACGTTTGGCCTACTTCGAGGTACTCCTTATGCACCGAAAATTGAACGCTATGTCCTCTTGATTGAAGAGGCTGAGGAAAGTAATTTTTATGAATTTGACCGCAACCTTGCTGCAATTTTACAAGCTTATCCTCATCCACAAGCTATTCTTATGGGGCGCTTTCCTAAAGAATGCGGCATGACTCCACAAGTCTTTGAATATATCCTTTCAAAACATGCTATTTTCAAGGAAATTCCTGTTATTTATGATATGGATTTTGCGCATACCCAACCTCTTTTGACAGTGACTATTGGAGCTGAGATAAGCGTTGACACTACTACATTATCTTTATCTATAAAAGAA

SEQ ID NO: 21786 - protein, 317 aa, Streptococcus agalactiae
MKKLTKGSHIRVLSPSSSIERLGGFEANLLAKEVLEKLGFQVSFSKHYLENDILYSASIASRIEDLHEAFADPSVDAILATIGGFNSNELLPYLDYDLISKNPKIICGYSDSTAFLNAIFAKAKIQTYMGPAYSSFKMKEGQPYQTQTWLTAMTENHYELWPSEEWSSDPWYDPSKPRQFFPTEWKIYNHGKASGTIIGGNLSTFGLLRGTPYAPKIERYVLLIEEAEESNFYEFDRNLAAILQAYPHPQAILMGRFPKECGMTPQVFEYILSKHAIFKEIPVIYDMDFAHTQPLLTVTIGAEISVDTTTLSLSIKE

SEQ ID NO: 21787 - protein, 1893 aa, Streptococcus agalactiae; identical to SEQ ID NO: 12347

SEQ ID NO: 21788 - protein, 631 aa, Streptococcus agalactiae; identical to SEQ ID NO: 12348

SEQ ID NO: 21789 - protein, 981 aa, Streptococcus agalactiae; identical to SEQ ID NO: 12349

SEQ ID NO: 21790 - protein, 327 aa, Streptococcus agalactiae; identical to SEQ ID NO: 12350

SEQ ID NO: 21791 - protein, 1074 aa, Streptococcus agalactiae; identical to SEQ ID NO: 12351

SEQ ID NO: 21792 - protein, 358 aa, Streptococcus agalactiae; identical to SEQ ID NO: 12352

SEQ ID NO: 21793 - protein, 177 aa, Streptococcus agalactiae; identical to SEQ ID NO: 12353

SEQ ID NO: 21794 - protein, 59 aa, Streptococcus agalactiae; identical to SEQ ID NO: 12354

SEQ ID NO: 21795 - protein, 642 aa, Streptococcus agalactiae; identical to SEQ ID NO: 12355

SEQ ID NO: 21796 - protein, 214 aa, Streptococcus agalactiae; identical to SEQ ID NO: 12356

SEQ ID NO: 21797 - protein, 612 aa, Streptococcus agalactiae; identical to SEQ ID NO: 12357

SEQ ID NO: 21798 - protein, 204 aa, Streptococcus agalactiae; identical to SEQ ID NO: 3398

SEQ ID NO: 21799 - protein, 999 aa, Streptococcus agalactiae
ATGTCTAAAAAAATGACCATTAATGACATCGCTCAATTATCAAAAACTTCCAAAACAACGGTTTCTTTTTTCTTGAATCAAAAATTTGAAAAAATGTCGGATGAGACGAGGCAGCGTATTCAAGAGGTGATTGATGAAACAGGTTATAGACCAAGTACGATAGCAAGAAGTCTAAATTCTAAAAAAACAAAACTACTAGGTGTCTTAATTGGAGATATAACAAACACATTTTCAAATCAAATTGTAAAAGGAATTGAGCACATCACCAAACAAAAAGGCTATCAAATTATTGTGGGTAATAGTAATTATGATGCCAAAAGTGAAGAAGATTATATTGAAAATATGTTAAATTTAGGTGTTGATGGTTTCATTATTCAGCCTACATCAAATTTTCGAAAGTATTCTCGTATTTTAAAAGAAAAAAAGAAACCAATGGTATTTTTTGATAGTCAACTTTATGAACATAAGACGAGTTGGGTTAAGGCTAATAACTATGATGCTGTTTATGATATGACACAGGAGTGTCTAAATCGAGGGTATAAAAAGTTTATTATGATTACTGCTGATACGAGCTTGCTTAGTACACGTATTGAGAGAGCTTCGGGATTCATGGATGCTTTAAAGGACAATGGTTTCGGTTATGACACTTTGGTGATTGAAGATGATGATCATTCAAAAAGTGATATAGAAGACTTTCTAAAAGCGGTAGTTCCAGATAAGGAGGAGACATTAGTATTTGCACCAAATTGTTGGGCTTTACCAATGGTTTTTACTGCCATGAAAAATCTCAATTTTGATATGCCACGAGTTGGTTTAGTTGGGTTTGACAATATTGAATGGACAGACTTTTCATCTCCTAAAGTGTCAACAATTGTCCAGCCGGCTTATGAAGAAGGTGAACAAGTAGCACAGATTTTGATTAATCGTATTGAAGGAGATGACTCCGTCGATAACCAACAGATTGTAGATTGCCAGATGTTTTGGAAAGAGTCGACTTTT

SEQ ID NO: 21800 - protein, 333 aa, Streptococcus agalactiae; identical to SEQ ID NO: 3400

SEQ ID NO: 21801 - protein, 1008 aa, Streptococcus agalactiae
TTGTTTTTTTCTGTTACTGAAACAAAATCATTTTCTTTTGATAATGTTAATTTAGAAACTTTACTTTTGTTTGGGAAGCCATCAATTTATCTTTTTGAAGAAATACCGCGTGCAACAATAGGTGAGTCTGCTTATCTTTTTCCAGATTCTGGTCATGTGTGTTTACGTGATGATAGGCGTTATATATTTTTTAAGAACGGTCCATTTGGTAGCGCTCATACTCATAGTGATAATAATAGTGTTTGTCTCTATGATAAAAAGAAACCTATTTTCATTGATGCAGGAAGATATACTTACAAAGAAGAACAACTAAGGTATGATTTTAAACGTTCGACTAGTCATTCAACATGTACCCTTGATGGGGAATCTTTAGAAATGATCAAGGACTCTTGGACATACAATTCTTATCCAAAATGTGACTATTGTCAGCTGACTTCAAAGGATAGGTACCATTTAGTCGAAGGACAACTACATGTCCAAAGAGCTTCTGATATCTATTACCATAAGCGATGGTTGTTAACTTTACCGCAGGCCATTACCTTAGTTATTGATAAGGTGAATTGTCCAGGAGAGCATGTTTTAACAAATCAATATATTTTAGATGATCAGGTCATTTATGAAAATGGGCTTGTTAACGACTTGAAATTAGTAAGTCCTACGACCTTTAATCTAGAAGATTGCCTTATTTCTAAGCGGTATAATCAATTGACAGAAAGTCATAAATTAGTTAAGAAAATAAAATTTGTTGATGAGGTGATGGATTATACCTTGATAGTTGATCGGAACTGTCAGGTGAAATGTGTTCCTTTAGTGCAAACGAACAGTCATAAGGAACTAAGTAATAGCATTGCATTTGATATTAGGTCTCAAGACTTTCATTATTTAATTGGAGTGCATATGGATGATATTATCTTTGGGGATAAACTCTATTTGATGCAAGGGATAAAATGCAAAGGAAAAGTCATTGTATATGATAAAAATAATGGCAAAATGAGTCGTTTAAAAAAT

SEQ ID NO: 21802 - protein, 336 aa, Streptococcus agalactiae
MFFSVTETKSFSFDNVNLETLLLFGKPSIYLFEEIPRATIGESAYLFPDSGHVCLRDDRRYIFFKNGPFGSAHTHSDNNSVCLYDKKKPIFIDAGRYTYKEEQLRYDFKRSTSHSTCTLDGESLEMIKDSWTYNSYPKCDYCQLTSKDRYHLVEGQLHVQRASDIYYHKRWLLTLPQAITLVIDKVNCPGEHVLTNQYILDDQVIYENGLVNDLKLVSPTTFNLEDCLISKRYNQLTESHKLVKKIKFVDEVMDYTLIVDRNCQVKCVPLVQTNSHKELSNSIAFDIRSQDFHYLIGVHMDDIIFGDKLYLMQGIKCKGKVIVYDKNNGKMSRLKN

SEQ ID NO: 21803 - protein, 246 aa, Streptococcus agalactiae
TTGATTGATAAATATAAAGAATTATTATCAAAAATCCCAGAGAATACACAAAATCCTGGGGAAAAGAATATACGAAATTATCTAGAGAAAGAATATGAAGAACTACTACAAAAAGATAGATTATTCAAGCATGAGTACACAGAGTTTACAAAAAGTCTAAATTTGAATGAAACATTCTATTCACAATTAAAAGAAGGAGAAATGAAACTAAGTGAAAATCCCGAAAAAGGAGAAACGAACACGAAT

SEQ ID NO: 21804 - protein, 82 aa, Streptococcus agalactiae
MIDKYKELLSKIPENTQNPGEKNIRNYLEKEYEELLQKDRLFKHEYTEFTKSLNLNETFYSQLKEGEMKLSENPEKGETNTN

SEQ ID NO: 21805 - protein, 612 aa, Streptococcus agalactiae; identical to SEQ ID NO: 8107

SEQ ID NO: 21806 - protein, 204 aa, Streptococcus agalactiae; identical to SEQ ID NO: 3426

SEQ ID NO: 21807 - protein, 423 aa, Streptococcus agalactiae; identical to SEQ ID NO: 17037

SEQ ID NO: 21808 - protein, 141 aa, Streptococcus agalactiae; identical to SEQ ID NO: 3428

SEQ ID NO: 21809 - protein, 4404 aa, Streptococcus agalactiae
ATGTCAGAATTGTTCAAGAAACTTATGGATCAGATTGAAATGCCGCTTGAAATTAAGAATTCAAGTGTTTTTTCGTCTGCTGATATTATCGAGGTAAAGGTTCATTCTCTATCACGCTTATGGGAATTTCATTTTTCATTTCCAGAATTATTGCCAATTGAGGTGTATTGTGAATTACAAACTCGTTTAGTGAATAGTTTTGAAAAAGCAGATATAAAGGCTACTTTTGATATAAGAGCAGAAACTATTGATTTTTCTGATGATCTGCTACAGGATTATTATCAACAAGCTTTTTGTGAACCCTTGTGTAATAGTGCAAGTTTTAAGAGTTCTTTTTCACAATTAAAAGTTCATTACAATGGCAGTCAGATGATTATTTCAGCACCTCAATTTGTCAATAATAATCATTTTCGTCAGAATCATTTGCCGCGCTTGGAACAACAATTTTCATTGTTTGGATTTGGTAAACTTGCTATTGATATGGTTTCTGATGAACAAATGACGCAAGACTTAAAATCATCATTTGAAACTAACCGCGAGCAATTGCTTGAAAAAGCTAACCAAGAGGCTATGCAAGCCTTGGAAGCACAAAAATCACTAGAAGATTCAGCGCCTCCATCAGAAGAAGTGACACCAACTCAAAATTATGATTTCAAAGAGCGTATCAAACAACGTCAAGCTGGCTTTGAAAAAGCAGAGATTACACCCATGATTGAGGTGACCACAGAAGAAAATCGTATCGTTTTTGAAGGAATGGTTTTTAGTGTTGAACGAAAAACAACCCGCACTGGACGTCATATCATTAATTTTAAGATGACTGATTATACCTCAAGTTTTGCTATGCAAAAGTGGGCTAAAGATGATGAAGAATTGAAGAAGTACGATATGATTTCTAAAGGTTCGTGGTTGCGGGTCAGAGGGAATATTGAGAACAATAACTTTACTAAATCTTTGACAATGAATGTTCAAGATATCAAAGAGATTGTGCATCATGAACGTAAAGACTTAATGCCAGCAGATCAAAAACGTGTGGAATTTCATGCTCATACCAATATGTCAACGATGGATGCTTTACCAACTGTCGAGAGCCTCATTGATACTGCAGCTAAGTGGGGACACCCAGCTATTGCAATTACTGACCATGCCAATGTTCAAAGTTTTCCGCACGGCTACCACAGAGCAAAAAAAGCAGGTATAAAAGCAATTTTTGGATTAGAGGCAAATATTGTTGAAGATAAAGTGCCTATTTCCTACAACGAAGTTGATATGAATTTGCACGAAGCAACTTATGTTGTATTTGATGTGGAAACTACAGGTCTTTCTGCAGCTAATAATGACCTAATTCAGATTGCAGCATCAAAAATGTTCAAGGGTAATATTATTGAGCAATTTGATGAGTTTATTGACCCAGGCCATCCTCTTTCTGACTTTACAACTGAGTTGACAGGTATTACGGATAATCATGTCAGAGGTTCAAAACCTATTTTACAAGTCCTTCAGGAATTTCAGAATTTTTGTCAAGGTACGGTTTTAGTTGCGCATAATGCAACCTTTGACGTTGGTTTTATGAATGCGAATTATGAACGTCATAATCTGCCTTTGATCACACAGCCGGTCATTGATACCTTAGAATTTGCAAGAAATCTTTATCCTGAATATAAGCGTCATGGTTTGGGGCCTCTAACCAAACGTTTCCAAGTTGCTTTGGAACATCATCATATGGCCAACTACGATGCTGAAGCAACGGGTCGCTTACTCTTTATTTTCTTAAAAGAGGCGCGGGAAAATCGTGATGTGACTAATTTGATGGAGCTCAATACTAAATTGGTAGCTGAAGACTCTTACAAAAAGGCACGCATAAAGCATGCAACCATTTATGTCCAAAATCAGGTTGGACTTAAAAATATATTTAAGTTAGTTAGCCTTTCAAATGTTAAATATTTTGAAGGGGTGGCAAGAATTCCTAGATCAGTTTTAGATGCTCACAGAGAAGGTCTCTTGCTAGGTACTGCCTGTTCTGATGGAGAAGTTTTTGATGCCTTGTTATCAAATGGAATTGATGCAGCAGTGACCCTAGCTAAATATTATGATTTTATTGAAGTCATGCCACCTGCTATTTATCGCCCCTTGGTGGTTCGTGATTTAATTAAAGATGAGGCGGGGATTCAACAAATTATTAGAGACCTAATAGAGGTCGGTCGGCGTTTAGATAAGCCTGTTTTAGCTACGGGAAATGTTCATTATATTGAGCCTGAAGATGAGATTTACCGTGAGATTATTGTTCGTAGTCTTGGACAAGGTGCCATGATTAATAGGACTATCGGTCGTGGGGAGGATGCTCAACCAGCGCCTTTGCCAAAAGCACATTTCCGTACAACAAATGAGATGTTAGATGAATTTGCCTTTCTTGGTAAAGATTTAGCCTATGAGATCGTTGTAACCAATACGAATACTTTTGCAGATCGATTTGAAGACGTTGAAGTTGTAAAAGGGGATCTCTATACCCCGTTTGTTGATCGTGCTGAAGAACGAGTTGCTGAATTAACTTATGCTAAAGCATTCGAAATATATGGTAATCCTCTTCCTGATATTATTGATTTACGTATCGAAAAAGAGTTAGCATCTATACTTGGTAATGGATTTGCCGTTATCTATCTTGCTTCGCAAATGTTGGTGCAACGTTCTAATGAACGTGGTTATCTAGTAGGATCACGTGGGTCTGTTGGGTCGAGTTTTGTAGCGACCATGATAGGAATTACTGAAGTTAATCCAATGCCACCTCATTATGTTTGCCCAAATTGTCAGCATTCTGAATTTATCACAGATGGTTCTTGTGGTTCAGGTTACGATTTACCAAATAAAAATTGTCCTAAATGTGGTACTTTGTACAAGAAAGATGGACAGGATATTCCGTTTGAAACTTTCTTAGGATTTGATGGAGATAAGGTTCCTGATATTGATCTAAATTTCTCTGGAGATGATCAACCTTCTGCTCACTTAGATGTTCGTGATATCTTTGGAGAAGAATATGCTTTTCGTGCAGGAACGGTAGGTACCGTAGCTGAAAAAACTGCCTTTGGTTTTGTCAAAGGTTACGAACGAGATTACAATAAATTTTATAACGATGCAGAGGTCGAACGGTTAGCGACTGGTGCTGCGGGAGTCAAACGTTCTACAGGTCAACACCCCGGTGGTATCGTTGTTATTCCTAACTATATGGATGTTTATGATTTTACTCCGGTTCAATATCCAGCAGATGATATGACAGCTGCTTGGCAGACAACTCACTTCAATTTCCATGATATTGATGAGAATGTCTTGAAGTTAGATATTCTAGGACATGATGATCCTACTATGATTCGTAAACTTCAGGATTTATCAGGAATTGATCCATCAAATATCCTTCCAGATGATCCAGACGTTATGAAGTTATTTTCTGGTACGGAAGTTTTAGGAGTGACAGAAGAGCAAATTGGAACTCCTACAGGGATGCTTGGTATTCCTGAGTTTGGTACGAACTTTGTTCGTGGTATGGTGAACGAAACCCATCCAACCACATTTGCAGAATTGTTGCAACTGTCAGGACTATCACATGGTACGGATGTTTGGTTAGGTAATGCTCAAGACTTAATCAAAGAAGGTATTGCTACCTTATCAACCGTTATTGGTTGTCGTGATGACATCATGGTTTATTTAATGCACGCTGGTCTACAACCAAAGATGGCCTTTACAATCATGGAGCGCGTGCGTAAGGGGTTATGGTTGAAAATTTCAGAAGATGAGCGTAACGGTTATATCCAAGCAATGCGTGATAATAATGTCCCGGATTGGTATATTGAATCGTGTGGAAAAATCAAGTATATGTTCCCTAAAGCCCATGCAGCAGCCTATGTTTTAATGGCCTTACGTGTGGCGTACTTTAAAGTACATTATCCAATATTTTATTATTGTGCTTATTTTTCTATTCGCGCCAAAGCTTTTGAATTACGCACAATGAGTGCTGGACTTGATGCCGTTAAGGCGCGCATGAAGGATATCACTGAGAAGCGTCAGCGTAATGAGGCGACGAATGTCGAAAATGATCTTTTTACGACATTAGAGTTGGTTAATGAAATGCTTGAGCGTGGCTTTAAATTTGGGAAATTAGATCTTTATCGTAGCCATGCGACTGACTTTATTATTGAAGAGGATACGCTAATCCCTCCATTTGTTGCTATGGAAGGCTTGGGAGAAAACGTTGCAAAACAGATAGTTCGAGCACGTGAAGATGGTGAATTTTTATCAAAAACAGAGCTTCGTAAACGAGGAGGAGTCTCAAGTACCTTAGTTGAAAAATTTGATGAGATGGGTATTTTGGGAAATTTACCAGAAGACAATCAGTTGAGTCTTTTTGATGATTTCTTC

SEQ ID NO: 21810 - protein, 1468 aa, Streptococcus agalactiae
MSELFKKLMDQIEMPLEIKNSSVFSSADIIEVKVHSLSRLWEFHFSFPELLPIEVYCELQTRLVNSFEKADIKATFDIRAETIDFSDDLLQDYYQQAFCEPLCNSASFKSSFSQLKVHYNGSQMIISAPQFVNNNHFRQNHLPRLEQQFSLFGFGKLAIDMVSDEQMTQDLKSSFETNREQLLEKANQEAMQALEAQKSLEDSAPPSEEVTPTQNYDFKERIKQRQAGFEKAEITPMIEVTTEENRIVFEGMVFSVERKTTRTGRHIINFKMTDYTSSFAMQKWAKDDEELKKYDMISKGSWLRVRGNIENNNFTKSLTMNVQDIKEIVHHERKDLMPADQKRVEFHAHTNMSTMDALPTVESLIDTAAKWGHPAIAITDHANVQSFPHGYHRAKKAGIKAIFGLEANIVEDKVPISYNEVDMNLHEATYVVFDVETTGLSAANNDLIQIAASKMFKGNIIEQFDEFIDPGHPLSDFTTELTGITDNHVRGSKPILQVLQEFQNFCQGTVLVAHNATFDVGFMNANYERHNLPLITQPVIDTLEFARNLYPEYKRHGLGPLTKRFQVALEHHHMANYDAEATGRLLFIFLKEARENRDVTNLMELNTKLVAEDSYKKARIKHATIYVQNQVGLKNIFKLVSLSNVKYFEGVARIPRSVLDAHREGLLLGTACSDGEVFDALLSNGIDAAVTLAKYYDFIEVMPPAIYRPLVVRDLIKDEAGIQQIIRDLIEVGRRLDKPVLATGNVHYIEPEDEIYREIIVRSLGQGAMINRTIGRGEDAQPAPLPKAHFRTTNEMLDEFAFLGKDLAYEIVVTNTNTFADRFEDVEVVKGDLYTPFVDRAEERVAELTYAKAFEIYGNPLPDIIDLRIEKELASILGNGFAVIYLASQMLVQRSNERGYLVGSRGSVGSSFVATMIGITEVNPMPPHYVCPNCQHSEFITDGSCGSGYDLPNKNCPKCGTLYKKDGQDIPFETFLGFDGDKVPDIDLNFSGDDQPSAHLDVRDIFGEEYAFRAGTVGTVAEKTAFGFVKGYERDYNKFYNDAEVERLATGAAGVKRSTGQHPGGIVVIPNYMDVYDFTPVQYPADDMTAAWQTTHFNFHDIDENVLKLDILGHDDPTMIRKLQDLSGIDPSNILPDDPDVMKLFSGTEVLGVTEEQIGTPTGMLGIPEFGTNFVRGMVNETHPTTFAELLQLSGLSHGTDVWLGNAQDLIKEGIATLSTVIGCRDDIMVYLMHAGLQPKMAFTIMERVRKGLWLKISEDERNGYIQAMRDNNVPDWYIESCGKIKYMFPKAHAAAYVLMALRVAYFKVHYPIFYYCAYFSIRAKAFELRTMSAGLDAVKARMKDITEKRQRNEATNVENDLFTTLELVNEMLERGFKFGKLDLYRSHATDFIIEEDTLIPPFVAMEGLGENVAKQIVRAREDGEFLSKTELRKRGGVSSTLVEKFDEMGILGNLPEDNQLSLFDDFF

SEQ ID NO: 21811 - protein, 582 aa, Streptococcus agalactiae
ATGAAAAGTCGAAAAAAAGATAAATTGGTATTGAGGTTAACAACAACACTATTAGTTTTTGGTTTGGGTGGGGTTTGGTTTTACAATTATAAAAATGATAATGTCGAACCGACAGTCACTAGTGCATCGGATCAAACGACGACTTTTATTCAAACGATTTCTCCAACAGCTATTGAAATTTCTAAGACCTATGATTTGTATGCGTCAGTCTTATTAGCACAAGCTATTTTGGAATCATCCAGTGGACAATCAGATTTGTCTAAGGCTCCTAATTATAACCTCTTTGGCATCAAAGGAGAATATAAAGGTAAATCTGTCCAAATGCCTACTTTAGAAGATGATGGGAAAGGCAATATGACTCAAATCCAAGCTCCTTTTCGCGCCTATCCAAATTATTCTGCTTCACTATATGATTATGCTGAGTTAGTATCTAGTCAAAAGTATGCATCTGCTTGGAAATCAAATACTTCTTCTTATAAGGATGCTACTGCAGCTCTAACAGGTCTTTATGCGACAGATACTGCTTATGCTAGTAAATTAAACCAAATTATTGAAACCTACAGTCTAGATGCTTATGATAAA

SEQ ID NO: 21812 - protein, 194 aa, Streptococcus agalactiae
MKSRKKDKLVLRLTTTLLVFGLGGVWFYNYKNDNVEPTVTSASDQTTTFIQTISPTAIEISKTYDLYASVLLAQAILESSSGQSDLSKAPNYNLFGIKGEYKGKSVQMPTLEDDGKGNMTQIQAPFRAYPNYSASLYDYAELVSSQKYASAWKSNTSSYKDATAALTGLYATDTAYASKLNQIIETYSLDAYDK

SEQ ID NO: 21813 - protein, 1851 aa, Streptococcus agalactiae
ATGAAACAAAGTAAAATGCTTATTCCAACACTTCGCGAAATGCCAAGTGATGCTCAGGTTATCAGCCATGCTCTTATGGTTCGTGCAGGATATGTCCGCCAAGTTTCGGCTGGAATCTATGCTTATTTGCCTCTAGCTAACCGTACTATTGAAAAATTTAAAACAATTATGCGTCAAGAATTTGAGAAGATTGGTGCAGTTGAAATGTTAGCTCCAGCTCTTCTTACAGCAGATTTATGGCGTGAATCTGGGCGCTACGAAACATATGGTGAAGACCTTTATAAATTAAAGAATCGTGATCAATCGGATTTTATCTTAGGACCAACTCATGAAGAGACTTTCACAACTCTTGTTCGTGATGCAGTAAAATCTTATAAGCAATTACCACTAAACCTTTATCAAATTCAGTCTAAATATCGTGATGAGAAGCGTCCTCGTAATGGACTTCTTCGAACACGTGAATTTATCATGAAAGATGGATACAGCTTCCACAAAGATTATGAAGACCTTGATGTCACTTACGAAGATTACCGTAAAGCATATGAAGCCATCTTCACACGTGCTGGACTTGACTTTAAAGGCATTATAGGTGACGGAGGTGCTATGGGAGGTAAAGATAGCCAAGAATTTATGGCAGTAACTCCCAATCGTACAGATTTAAATCGTTGGTTAGTCCTTGATAAAACTATTCCTTCTATTGATGATATTCCAGAGGATGTTTTAGAAGAAATTAAGGCAGAACTCTCGGCTTGGCTAGTTTCTGGTGAGGACACTATTGCATACTCCACTGAATCAAGCTATGCTGCTAACCTTGAGATGGCAACGAATGAGTACAAACCATCTACTAAGGCTGCTACCTTTGAAGAAGTAACAAAAGTAGAAACTCCTAACTGCAAATCAATTGATGAGGTAGCTGGATTTTTATCAATTGATAAAAATCAAACTATCAAGACACTATTGTTTATTGCTGATGAACAGCCCGTGGTTGCTTTACTAGTTGGTAACGATCAAGTCAATGATGTGAAGTTAAAAAATTATTTAGCGGCTGATTTCTTAGAGCCTGCAAGTGAAGAGCAAGCAAAAGAGATTTTTGGTGCAGGTTTTGGTTCTCTTGGGCCAGTTAACCTACCTGAGTCTGTTAAAATTATTGCTGATCGTAAAGTTCAAGACCTTGCTAATGCTGTGTCTGGTGCTAACCAAGATGGTTATCATTTTACTGGAGTTAATCCAGAACGTGATTTCACAGCTGAATACGTTGATATTCGTGAAGTAAAAGAAGGGGAGATTTCTCCAGACGGTAAAGGTACTCTGAAATTTTCTCGTGGTATTGAAATTGGACATATCTTTAAACTAGGTACCCGTTATTCAGATAGTATGGGAGCAAACATCCTTGATGAAAATGGCCGCTCAAATCCTATTGTTATGGGGTGTTATGGTATTGGTGTTAGTCGTATTCTCTCAGCTGTCATTGAACAACATGCCCGACTTTTTGTGAATAAGACACCAAAAGGAGCTTATCGCTTTGCTTGGGGGATTAATTTCCCAGAAGAATTAGCCCCATTTGATGTACATTTGATTACTGTCAATGTCAAAGATCAAGAGTCACAAGATCTTACTGAGAAAATTGAAGCTGATTTGATGCTTAAAGGTTATGAAGTCCTGACAGACGATCGTAATGAACGTGTTGGTTCTAAATTCTCAGACAGTGACTTAATTGGACTTCCAATTCGAGTAACTGTTGGGAAGAAAGCTTCTGAAGGTATCGTTGAAGTGAAAATTAAAGCAAGTGGTGATACGATTGAGGTTCACGCTGATAACTTAATTGAAACTTTAGAGATTCTAACAAAAAAA

SEQ ID NO: 21814 - protein, 617 aa, Streptococcus agalactiae
MKQSKMLIPTLREMPSDAQVISHALMVRAGYVRQVSAGIYAYLPLANRTIEKFKTIMRQEFEKIGAVEMLAPALLTADLWRESGRYETYGEDLYKLKNRDQSDFILGPTHEETFTTLVRDAVKSYKQLPLNLYQIQSKYRDEKRPRNGLLRTREFIMKDGYSFHKDYEDLDVTYEDYRKAYEAIFTRAGLDFKGIIGDGGAMGGKDSQEFMAVTPNRTDLNRWLVLDKTIPSIDDIPEDVLEEIKAELSAWLVSGEDTIAYSTESSYAANLEMATNEYKPSTKAATFEEVTKVETPNCKSIDEVAGFLSIDKNQTIKTLLFIADEQPVVALLVGNDQVNDVKLKNYLAADFLEPASEEQAKEIFGAGFGSLGPVNLPESVKIIADRKVQDLANAVSGANQDGYHFTGVNPERDFTAEYVDIREVKEGEISPDGKGTLKFSRGIEIGHIFKLGTRYSDSMGANILDENGRSNPIVMGCYGIGVSRILSAVIEQHARLFVNKTPKGAYRFAWGINFPEELAPFDVHLITVNVKDQESQDLTEKIEADLMLKGYEVLTDDRNERVGSKFSDSDLIGLPIRVTVGKKASEGIVEVKIKASGDTIEVHADNLIETLEILTKK

SEQ ID NO: 21815 - protein, 1256 aa, Streptococcus agalactiae
ATGCTAGGAATTTTAACCTTTATTATTATTTTTGGTGTCATTGTAGTTGTTCACGAATTTGGGCATTTCTATTTTGCAAAGAAATCAGGAATTCTTGTTCGTGAATTTGCTATTGGTATGGGTCCAAAAATCTTTTCTCACATTGATAAAGAAGGAACAACCTATACTATTCGTATATTACCGCTAGGTGGTTATGTCCGTATGGCTGGTTGGGGTGATGATAAACTGAAATTAAGACAGGGACGCCGGCTAGCCTTACTTTAAATAAAGAAGGCATTGTAACTCGTATTAATTTATCAGGAAAACAATTAGACAATACTTCTTTACCAATCAATGTAACAGCTTATGATTTAGAAGATAAACTAACTATCACAGGATTGGTCTTAAGTGAGACAAAAACCTATAGTGTTGATCACGATGCTACTATCATTGAGGAGGATGGTACTGAAATTCGTATTGCTCCCTTAGATGTGCAGTATCAGAATGCTTCTGTATGGGGGCGCTTAATTACCAATTTTGCAGGTCCGATGAATAATTTTATTTTAGGTCTTGTAGTCTTTATTGCACTTGCTTTTATTCAAGGAGGTGTTCAAGATTTATCAACCAATCAGGTCCGTGTATCAGAAAATGGTCCTGCTGCTAGTGCAGGTTTAAAAAATAATGACCGTATTTTACAAATAGGGTCGCACAAAGTTTCTAACTGGGAACAGTTGACAGCAGCAGTAGAAAAGTCAACTAGTCATTTAGAAAAAAACCAAAAACTTGCCCTTAAAATTAAGAGCAAAGAGGTGGTGAAAACGATCAACGTTAAGCCACAGAAAGTTGATAAATCCTACATCATCGGCATTATGCCAGCTCTAAAGACAAGCTTTAAAGACAAGCTTTTAGGTGGATTTAAACTAGCATGGGAAAGTTTCTTTAGAATTTTAAATGAATTAAAGAAACTTATTGCTCATTTTAGTATTAATAAATTGGGAGGTCCAGTAGCTCTCTATCAGGCTAGTAGCCAAGCTGCTAAAAATGGTTTCGTCACAGTTCTCAACTTAATGGGATTAATCTCTATCAACTTAGGTATTATGAATCTCATCCCTATACCAGCCCTTGACGGGGGTAAGATAGTGATGAATATTTTAGAAGCCATTCGTCGCAAACCACTTAAACAAGAAACAGAAACTTATATTACGCTCGCTGGGGTAGCAGTTATGTTAGTATTAATGATTGCTGTAACCTGGAACGATATCATGCGAGCTTTCTTC

SEQ ID NO: 21816 - protein, 419 aa, Streptococcus agalactiae; identical to SEQ ID NO: 17052

SEQ ID NO: 21817 - protein, 792 aa, Streptococcus agalactiae
ATGAAAGAACGTGTTATTTGGGGAGCTGTCGCGCTTGCCATATTTATCCCTTTTTTAGTAATGGGTGGTTTGCCTTTCCAATTTTTAGTTGGACTTTTAGCTATAATTGGTGTTTCTGAATTACTTCGTATGCGTCGTTTAGAAATATTTTCCTTTGAAGGTGCATTAGCTATGATAGGAGCCTTTGTTTTAACAGTTCCTTTAGATAGTTATTTGTCCTTTTTACCAGTTGACGCTAGTTTATCAGCATACGGTATTGTTATTTTTATGATTTTGGCAGGTACTGTTTTGAACAGTAATTCTTACAGTTTTGAAGATGCTGCCTTTCCAATTGCGTCTAGTTTTTATGTGGGTATTGGCTTTCAAAATCTAGTCAGTGCTCGTATGGCTGGAATAGATAAGGTGTTGTTAGCTTTATTTATTGTCTGGGCGACTGATATCGGTGCTTATATGATTGGTCGTCAATTTGGACAACGCAAACTACTACCTTCAGTGTCTCCAAATAAAACAATTGAAGGGAGTCTGGGAGGAATTGCTTCAGCCATTGTGGTAGCTTTCTTTTTTATGCTTTTTGATAAGACCGTCTATGCGCCTCATAGCTTCCTAGTCATGTTAGTTTTAGTGGCTATCTTTAGCATTTTTGGTCAATTTGGAGATTTAGTTGAAAGTAGTATTAAACGTCATTTTGGTGTTAAAGATTCGGGTAAATTGATTCCGGGTCATGGGGGGATTTTGGATCGCTTTGATAGTATGATTTTTGTTTTCCCAATCATGCACTTCTTTGGCTTATTC

SEQ ID NO: 21818 - protein, 264 aa, Streptococcus agalactiae
MKERVIWGAVALAIFIPFLVMGGLPFQFLVGLLAIIGVSELLRMRRLEIFSFEGALAMIGAFVLTVPLDSYLSFLPVDASLSAYGIVIFMILAGTVLNSNSYSFEDAAFPIASSFYVGIGFQNLVSARMAGIDKVLLALFIVWATDIGAYMIGRQFGQRKLLPSVSPNKTIEGSLGGIASAIVVAFFFMLFDKTVYAPHSFLVMLVLVAIFSIFGQFGDLVESSIKRHFGVKDSGKLIPGHGGILDRFDSMIFVFPIMHFFGLF

SEQ ID NO: 21819 - protein, 750 aa, Streptococcus agalactiae
ATGTTTATATTTAAAAGAAAAAAACAAGTAGAAATGCCTTTGGAGAAAATACCAGCACATATTGGTATTATCATGGATGGTAACGGACGTTGGGCAAAAAAACGTTTAAAACCACGCGTTATGGGACATAAGGCGGGGATGGATGCTCTTCAAGAAGTTACAATAGCAGCTTCAGAATTAGGTGTTAAAGTACTAACTGTCTATGCCTTTTCTACAGAAAATTGGTCACGTCCAGATGATGAAGTTAAGTTTATTATGAACCTTCCGGTTGAATTTTTTGATAAATATGTACCAGAGTTAGATAAAAATAATGTACGTGTACAGGTCATCGGAGATACTCATAAATTACCTAAGGCAACATACGATGCAATGCAACGCGCTTGTTTGAGGACAAAACATAATTCGGGGCTCGTATTGAATTTTGCGCTAAATTATGGCGGACGTTCAGAAATCACTAATGCCATTAAGGAAATTGCTCAGGATGTTTTGGAAGCTAAGTTGAATCCTGACGATATTACAGAGGATTTAGTAGCAAATCATTTAATGACAAATAGCTTACCCTATCTTTATAGGGACCCTGATTTGATTATCCGCACTAGTGGAGAGTTACGCTTGAGTAACTTTTTACCTTGGCAATCAGCTTATAGTGAATTTTACTTTACTCCCGTTTTATGGCCAGATTTTAAAAAAGACGAACTACATAAGGCCATTGTGGATTATAATCAACGCCATCGTCGATTTGGTAGTGTA

SEQ ID NO: 21820 - protein, 250 aa, Streptococcus agalactiae; identical to SEQ ID NO: 12396

SEQ ID NO: 21821 - protein, 495 aa, Streptococcus agalactiae
ATGCCCTTACGTGTGGCGTACTTAAAAGTACATTATCCAATATTTTATTATTGTGCTATTTTTTCTATTCGCGCCAAAGCTTTTGAATTACGCACAATGAGTGCTGGACTTGATGCCGTTAAGGCGCGCATGAAGGATATCACTGAGAAGCGTCAGCGTAATGAGGCGACGAATGTCGAAAATGATCTTTTTACGACATTAGAGTTGGTTAATGAAATGCTTGAGCGTGGCTTTAAATTTGGGAAATTAGATCTTTATCGTAGCCATGCGACTGACTTTATTATTGAAGAGGATACGCTAATCCCTCCATTTGTTGCTATGGAAGGCTTGGGAGAAAACGTTGCAAAACAGATAGTTCGAGCACGTGAAGATGGTGAATTTTTATCAAAAACAGAGCTTCGTAAACGAGGAGGAGTCTCAAGTACCTTAGTTGAAAAATTTGATGAGATGGGTATTTTGGGAAATTTACCAGAAGACAATCAGTTGAGTCTTTTT

SEQ ID NO: 21822 - protein, 165 aa, Streptococcus agalactiae
MPLRVAYLKVHYPIFYYCAIFSIRAKAFELRTMSAGLDAVKARMKDITEKRQRNEATNVENDLFTTLELVNEMLERGFKFGKLDLYRSHATDFIIEEDTLIPPFVAMEGLGENVAKQIVRAREDGEFLSKTELRKRGGVSSTLVEKFDEMGILGNLPEDNQLSLF

SEQ ID NO: 21823 - protein, 273 aa, Streptococcus agalactiae
ATGAGCTTACCTATTATTATGCTTGTTGTTATGGTTGGTATGATGTTCTTCATGCAACGTCAGCAAAAGAAACAAGCACAAGAACGTCAAAAACAATTGAATGCTGTTCAAAAAGTGATGAAATGTCACAATTGGTGGTCTTTTGGAGTAGTTGATGAAGTTAATACTGAAGCACAACGGATGGTTTTAGATGTTGATGGTGTCTACTTGACGTTTGAGTTGGCAGCTATCAAATCTGTTGTCTCTAAGGCAGCAACACCAACNNNNNTTAAT

SEQ ID NO: 21824 - protein, 92 aa, Streptococcus agalactiae
  VARIANT 90, 91: Xaa = Any Amino Acid
MSLPIIMLVVMVGMMFFMQRQQKKQAQERQKQLNAVQKGDEIVTIGGLFGVVDEVNTEAQRMVLDVDGVYLTFELAAIKSVVSKAATPTXXN

SEQ ID NO: 21825 - protein, 342 aa, Streptococcus agalactiae; identical to SEQ ID NO: 17061

SEQ ID NO: 21826 - protein, 114 aa, Streptococcus agalactiae; identical to SEQ ID NO: 17062

SEQ ID NO: 21827 - protein, 1161 aa, Streptococcus agalactiae; identical to SEQ ID NO: 17063

SEQ ID NO: 21828 - protein, 387 aa, Streptococcus agalactiae; identical to SEQ ID NO: 17064

SEQ ID NO: 21829 - protein, 1335 aa, Streptococcus agalactiae
ATGGCAGACGTGAAGGTAGTGAATAATGAGGGTTCTAGAGGTCAAAAGCAAGACTTAAAGACTAAACTATTTCATATTAAGGTAGGCTCAGTTCCCTTACCAGTATATGTTTGTTTAGCATTATTGATTCTTCTAGCAGGCTTTTTACAAAAATTGCCAGTCAATATGCTAGGAGGATTTGCAGTCATCTTAACAATGGGATGGTTCTTAGGTACTATTGGAGCTAGCATCCCTGGTTTTAAAAACTTCGGTGGCTCAGCTATTTTATCTTTATTAGTACCATCTATTTTGGTGTTTTTCAACCTCATTAATAAAAATGTTTTAGAGTCAACAAATATGTTGATGAAGCAAGCTAACTTTCTTTATTTTTATATTGCTTGTTTAGTGTCCGGTAGTATTTTAGGGATGAATCGGAAAATGTTGATTCAGGGATTACTAAGAATGATTTTCCCCATGTTATTAGGAATGGTTTGTGCGATGATGGTAGGGACATTTGTCGGTGTTATTTTAGGCTTAGAGTGGCGACACACTTTGTTTTATATCGTAACACCCGTTTTAGCTGGTGGTATTGGTGAAGGTATTTTACCATTATCGTTAGGCTATAGTTCAATTACCGGTGTAGCTAGCGAACAACTAGTTGCTCAACTCATCCCAGCCACTATTATTGGTAATTTCTTTGCCATTTTATGTACTGCACTATTGAATCGTTTGGGAGAAAAGAAACCACACTTGTCTGGTCAAGGGCAATTAGTAAGGTTAAATAAAGGAGAGGACATGTCAGATATTATTGCTGATCATTCTGGCCCAATTGACGTTAAGAAAATGGGTGGAGGTGTTTTAACAGCATGTAGTCTCTTTATTTTTGGACATTTGTTGCAGCAATTAACTGGATTTCCTGGTCCCGTATTAATGATTATCGCAGCAGCTATTTTGAAATATATCAATGTTATTCCTAGTGAAACACAAAATGGAGCTAAGCAACTTTATAAATTTATTTCTGGTAATTTTACATTTCCTCTAATGGCAGGGCTAGGATTGCTTTATATCCCGTTAAAAGATGTTGTGGCAACGCTTAGCATACAATATTTCATAGTTGTTATTAGTGTTGTATTTACAGTTATTTCTGTTGGATTCTTTGTATCGCGATTCCTTAATATGAATCCTGTTGAAGCAGGTATTATTTCAGCTTGTCAAAGTGGTATGGGAGGAACAGGAGATGTTGCCATTTTAAGTACAGCAGACCGAATGAACTTGATGCCATTTGCTCAAGTTGCTACGCGTTTAGGAGGAGCTATTACTGTTATCACGATGACAGCCATTTTACGCATGTTATTC

SEQ ID NO: 21830 - protein, 445 aa, Streptococcus agalactiae
MADVKVVNNEGSRGQKQDLKTKLFHIKVGSVPLPVYVCLALLILLAGFLQKLPVNMLGGFAVILTMGWFLGTIGASIPGFKNFGGSAILSLLVPSILVFFNLINKNVLESTNMLMKQANFLYFYIACLVSGSILGMNRKMLIQGLLRMIFPMLLGMVCAMMVGTFVGVILGLEWRHTLFYIVTPVLAGGIGEGILPLSLGYSSITGVASEQLVAQLIPATIIGNFFAILCTALLNRLGEKKPHLSGQGQLVRLNKGEDMSDIIADHSGPIDVKKMGGGVLTACSLFIFGHLLQQLTGFPGPVLMIIAAAILKYINVIPSETQNGAKQLYKFISGNFTFPLMAGLGLLYIPLKDVVATLSIQYFIVVISVVFTVISVGFFVSRFLNMNPVEAGIISACQSGMGGTGDVAILSTADRMNLMPFAQVATRLGGAITVITMTAILRMLF

SEQ ID NO: 21831 - protein, 1524 aa, Streptococcus agalactiae
ATGAAAAAAAAACTATCTCTTTGGGCATTTCTATCATTGATTTTAGTCACTATGACCATTTGTATATTTTCTATTTTTTATTATGTCACTATACATCAGTCCTATCGTATGGTAAGGGTACAGGAAGAAAAAATCTTAAAAAATACTGGTTATGCTTTATCGAGAAATCCACAAGTTATACAAACACTCAAAGATAATCACTATAATCAAAGTCTCCAAAAACAAATGCTATTCCTTAGCAAAAAATCAAATTTAGACTATATTGTCCTTATAAATTTAAAAGGGATCCGTTTTACCCACCCTGACTCCACTAAGATTGGTAAACCATTTCAAGGCGGTGATGAACAAGCTGTTTTTAAGGGAAAAGCTATTATGTCTACTGCAGAAGGTTCTTTAGGAAAATCTTTACGATACTTAATTCCAGTATATGATCACCAAAAACAGGTTGGGGCAATTGCAGTTGGCTTAAAATTAACGACACTTGGAGACTTATCTCAAAGCAGCATAAAAGAGTTTAGTAAGCCTCTCTTGATTAGTATTTTGATTAGCTTAGTCGTCACAAGTATAATTTCTTATGGCTTAAAAAAACAACTTCACAACCTCCATCCAAGTGATATTTTTCAACATTTAGAAGAGCGCAATGCAACACTGGACCAAATTCAAGCCGCTGTATTTGTTATTGACCAGAGGCATATCATCAAAAGAAATAATCCTGCAGCTAGTTTATTATTCAAAAAAGAGGGGCAACGAGACCTATTTTCAGGTAAATTATTAGAATCTTTAATTCCTCAACTCAAGCAGAATCATTTTTCAAAAAAAACTGAACAAGTATTACATTTTCAAGGACAAGACTATTTACTATCTATCTCGCCAATTACGGTTAAAACACAAAATAGAGGCTATGTTGTCTTCTTAAGGAATGTTACTGAAACACTTTTCACTTTGGATCAATTAGCACACACTACAGCTTATGCTTCTGCTCTACAGGCCCAAACACATCAATTTATGAATCAACTTCATGTTATTTATGGACTTGCAGACATCGAATACTACGACGAGTTGAAAATTTATTTAAAAGAATTATTGGAGCCACAAAATGAATTTTTAGCACGCTTATCAATGTTAGTTAGAGAGCCTCGACTGGCTAGTTTCATTATTGGCGAAAGAGAAAAATTCGCAGAAAAACACATCAATCTATCCACAGAAATTTTAGTAGAAATCCCTACCAAGTCAACTGTTGAGGATGTTAATAACTATCTCTTGCTCCACAGATATATTAATACGAAGATACTCACGCTATTAAATTCAACGACTTTAGTTTCTTTACGTTTAAATTATCAAAATAACCTCATTGAAACAGATTATCAATGGGAGAATGAGAAGTGGTTACTCAATGACTACCATCAGTATTTCAACGACGCTTATTTTCAACAGTTACTTGTAGATTCAAGAGCTACTTATAAGATCTCTTTAAAACAAAATAAGGTTATTATAAGAACAAATATTATCTACTCAGAAGGGTCT

SEQ ID NO: 21832 - protein, 508 aa, Streptococcus agalactiae
MKKKLSLWAFLSLILVTMTICIFSIFYYVTIHQSYRMVRVQEEKILKNTGYALSRNPQVIQTLKDNHYNQSLQKQMLFLSKKSNLDYIVLINLKGIRFTHPDSTKIGKPFQGGDEQAVFKGKAIMSTAEGSLGKSLRYLIPVYDHQKQVGAIAVGLKLTTLGDLSQSSIKEFSKPLLISILISLVVTSIISYGLKKQLHNLHPSDIFQHLEERNATLDQIQAAVFVIDQRHIIKRNNPAASLLFKKEGQRDLFSGKLLESLIPQLKQNHFSKKTEQVLHFQGQDYLLSISPITVKTQNRGYVVFLRNVTETLFTLDQLAHTTAYASALQAQTHQFMNQLHVIYGLADIEYYDELKIYLKELLEPQNEFLARLSMLVREPRLASFIIGEREKFAEKHINLSTEILVEIPTKSTVEDVNNYLLLHRYINTKILTLLNSTTLVSLRLNYQNNLIETDYQWENEKWLLNDYHQYFNDAYFQQLLVDSRATYKISLKQNKVIIRTNIIYSEGS

SEQ ID NO: 21833 - protein, 678 aa, Streptococcus agalactiae; identical to SEQ ID NO: 17069

SEQ ID NO: 21834 - protein, 226 aa, Streptococcus agalactiae; identical to SEQ ID NO: 12414

SEQ ID NO: 21835 - protein, 993 aa, Streptococcus agalactiae; identical to SEQ ID NO: 17071

SEQ ID NO: 21836 - protein, 331 aa, Streptococcus agalactiae; identical to SEQ ID NO: 17072

SEQ ID NO: 21837 - protein, 1605 aa, Streptococcus agalactiae
ATGAAGAAACACTGGTGGCATAAAGCTACGATTTATCAAATTTACCCACGTTCATTTATGGATTCAGATGGTGATGGTGTGGGGGACATTAAAGGGATTACTAGCAAACTAGACTACCTTGAAAAATTAGGGATTACTGCTATCTGGTTATCACCTGTTTACCAAAGTCCAATGGATGACAATGGTTATGATATTTCAGATTATCAAGCCATTGCAGATATTTTCGGTGACATGAATGATATGGACCAACTGTTACAAGAGGCAAATCAACGCGGGATTAAAATCATCATGGATTTGGTAGTGAATCATACCTCTGATGAACATGCTTGGTTCGTAGAAGCGCGAGAAAACCCTAATAGTCCTGAACGTGATTTTTATATTTGGCGAGATGAACCTAACGATTTGACTTCTATTTTTAGTGGCTCAGCTTGGGAATATGATAAAGCATCAGGTCAATATTATTTGCACCTTTTTAGTAAACGTCAGCCAGATCTCAACTGGGAGAATGAAGCTTTACGTCATAAAATTTATGATATGATGAATTTCTGGATTGATAAGGGTATTGGTGGTTTCCGTATGGATGTCATTGATTTAATTGGGAAAATTCCAGATAAGGGCATTACTGGTAATGGACCAAAACTCCATGATTATCTTAAAGAAATGAACAGAGCTAGTTTTGGAAAGCATGACTTATTGACGGTGGGTGAAACTTGGGGAGCAACGCCAGACATTGCAAAACAATACTCAAATCCCGATAATGAAGAATTATCTATGGTCTTTCAATTTGAACATGTAGGTCTTCAACATAAACCTGACGCTCCTAAGTGGGATTACAGTGACGGATTAGATGTTCCAGCATTGAAAGATATTTTTACAAAATGGCAAACACAATTGGAGCTTGGCCAAGGTTGGAATTCTTTATTCTGGAATAATCACGACCTTCCTCGGGTGCTCTCGATTTGGGGAAATGATAGTGATAACAGAAAACAATCTGCCAAGGCTCTAGCAATCCTACTACATTTGATGCGTGGAACGCCTTACATCTATCAAGGTGAAGAAATTGGTATGACCAATTATCCATTTGAGTGTTTAGCAGATGTAGATGATATTGAATCCCTTAACTATGCTAAAGAAGCCATGGATAATGGGGTATCTGAAGCAACAATTTTAGATAGTATTCGTAAAGTCGGTCGTGATAATGCTCGTACTCCAATGCAGTGGAGTCAAGGACATCAAGCTGGTTTTACTAACGGTACCCCATGGCTAGCAGTCAATCCCAATTATCAGGAAATTAATGTGGAGGCAGCGTTAAATGATACGGAAAGTATTTTTTATACTTATCAAAAATTAGTTGCTTTACGTAAAGAACACGACTGGTTAGTTGATGCTGATTTTAAACTTTTGGAAACAGCAGATAAGGTATTTGCTTATGTTCGTCAAACAGATAAAGAACGTTATTTAATAGTTGCAAACTTATCCGATCAAAACCAATCTTTTGAATTTCCAGAAGCTGTTAAAGAAACTATTATTTCAAATACAGAGGTTCAAGAAGTACTATCAAGTAACACTCTCAAGCCGTGGGATGCCTTCTGCATAGAGCTATTC

SEQ ID NO: 21838 - protein, 535 aa, Streptococcus agalactiae; identical to SEQ ID NO: 17074

SEQ ID NO: 21839 - protein, 1131 aa, Streptococcus agalactiae; identical to SEQ ID NO: 17075

SEQ ID NO: 21840 - protein, 377 aa, Streptococcus agalactiae; identical to SEQ ID NO: 3460

SEQ ID NO: 21841 - protein, 849 aa, Streptococcus agalactiae
ATGGATTTTAAGGAACTGTTTCCAGAAGTTATTACTAAACAGGAAGTTAAACAGAGTGAGGATTATATCATCGTTGAGCAAGATGGTCATGTCCTCCACTTTCCAAAATATTCGCTAACTAAGCGTGAACTATGCTTATTACAAATGACACCAAGCCTGGAAGATGCGAGTTCAGTGGATTCTCAGAATCCTTGGTACCGCTATCTAGTTGAAGGTCGTGGAAGGTTGCCCCAATCTCATTCGGCAGTCCAATTTATTTTTATTGAGCATCAATTTACCTTATCAGAAGAACTTAAGGATTTCTTGTCGCCTTTAGTAATAAACGTAGAAAAAATTATGACAATTAATCAAACCCAAAGTGTCATGATTTTAAATCAGGATAATTTCTTTAATGCTACGGAATTACTAACAGATATTTTACCAACGATTGAAAATGACTTTAACACGCGTTTAAGATGCTATTTTGGAAATAGTTGGACGCATCTACAAGCAGTGGACTGGAAAGAATTATATGAAGAAGAATATAAACTTTTTACGCTTTTTCTTAGTCACAAGGCCGAACAACATTACTGTCGATTTCCAAAGATGGCTTTATGGGCTTTGGCAAATCAATCGCCCATGCCTTCTATTAAAGCAAAATGTTTACAACATATCCTTGATACGAGTGATACTTCGGCTATAATAAAAGCCTTGTGGCAAGAGCAAGGGAACCTTGCTAAAACGGCTAAGGCACTTTTCATTCATCGGAATTCATTGCAATATAAATTAGATAAATTTACCCAATCTTCGGGGCTTAATTTAAAAATATTAGATGATTTAGCCTATGCCTATTTAATTTCGATGGATACC

SEQ ID NO: 21842 - protein, 283 aa, Streptococcus agalactiae
MDFKELFPEVITKQEVKQSEDYIIVEQDGHVLHFPKYSLTKRELCLLQMTPSLEDASSVDSQNPWYRYLVEGRGRLPQSHSAVQFIFIEHQFTLSEELKDFLSPLVINVEKIMTINQTQSVMILNQDNFFNATELLTDILPTIENDFNTRLRCYFGNSWTHLQAVDWKELYEEEYKLFTLFLSHKAEQHYCRFPKMALWALANQSPMPSIKAKCLQHILDTSDTSAIIKALWQEQGNLAKTAKALFIHRNSLQYKLDKFTQSSGLNLKILDDLAYAYLISMDT

SEQ ID NO: 21843 - protein, 894 aa, Streptococcus agalactiae
ATGGCTATTACGATACAAAATCATGAGTTGCAAGTGACATTAAAAGCGTTAGGTGCAACAATGACTTCTATTACAGATAGTCAAGGCGTTGAGTACCTTTGGCAAGGGGACCCCACTTATTGGGGTGGGCAAGCTCCTATTTTATTTCCTATATGCGGAAGTGTTCGAAATGATTGTGTCATTTACAGACCAGCTCAAGCTCCACATTTTACGGGTATCATACCAAGGCATGGCTTTGTACGTCACAAAACATTCGACTATGATTACATATCGGATTCTTCTGTTCGTTTTACAATTAAAAGTAGTAAAGAAATGTTGATAAATTATCCTTATCGTTTTAGTTTAGAAATAACTTACACCTTAAGAAATAAAAGCATTGCCATTACATATATTGTCAAAAACTTAGAATCAGAAAAAAATATGCCATATGCTATCGGAGCTCACCCAGGCTTTAATTGCCCTTTGTTTGAAAAGGAAGTATTTAGTGATTACTATCTAGAGTTTGAACAGTTTGAAACTTGCACAATTCCTGAGTCGTTTCCGGATACAGGCTTGTTAGATTTACAAGCTAGACATCCTTTTTTAGAAAATCAAAAACAATTATCTCTTAATCATGCTTTATTTGAAAAAGATGCTATTACTTTAGACCAACTACGATCTAAGACGGTTTACTTAAAATCTAGAAATCATGCAAAAGGAATCCAACTTGACTTTGATGATTTTGAGAATCTTATTCTTTGGACAAGTAACAATGGTGGTCCTTTTTTGGCTTTGGAACCCTGGAGTTCTTTGTCAACTTCTATTGAAGAGTCTGATATTTTAGAAGATAAACAAAATATCGTACGGCTTAATCCAAAGCAGTCGAAACAGCATTCTATTCGGATCACTATTTTA

SEQ ID NO: 21844 - protein, 298 aa, Streptococcus agalactiae
MAITIQNHELQVTLKALGATMTSITDSQGVEYLWQGDPTYWGGQAPILFPICGSVRNDCVIYRPAQAPHFTGIIPRHGFVRHKTFDYDYISDSSVRFTIKSSKEMLINYPYRFSLEITYTLRNKSIAITYIVKNLESEKNMPYAIGAHPGFNCPLFEKEVFSDYYLEFEQFETCTIPESFPDTGLLDLQARHPFLENQKQLSLNHALFEKDAITLDQLRSKTVYLKSRNHAKGIQLDFDDFENLILWTSNNGGPFLALEPWSSLSTSIEESDILEDKQNIVRLNPKQSKQHSIRITIL

SEQ ID NO: 21845 - protein, 975 aa, Streptococcus agalactiae
ATGGGATTAACAGAACAAAAACAAAAACATATGGAACAATTGAGTGATAAAAATGGTATTATTTCGGCCTTGGCTTTTGACCAACGTGGAGCATTGAAGCGATTAATGGCAAAATATCAATCTGAGGAGCCTACTGTTTCTCAAATAGAAGCACTTAAAGTTTTGGTAGCTGAAGAATTAACCCCTTACGCTTCATCAATGTTGTTAGATCCAGAATATGGGTTGCCAGCTACGAAAGTTTTAGATGATAATGCCGGTCTTTTACTTGCGTACGAAAAAACGGGTTATGATACCAGTAGTACCAAGCGACTCCCAGACTGTTTAGACATTTGGTCTGCGAAACGCATTAAAGAAGAGGGAGCAGACGCAGTTAAGTTCTTACTTTATTATGATGTTGATAGTTCGGATGAAGTAAACGAAGAAAAAGAAGCTTATATTGAACGGATTGGTTCTGAATGTGTTGCAGAAGACATTCCTTTTTTCCTTGAAATTTTGTCATATGATGAAAAGATTACGGATAGCTCAGGTATTGAGTATGCCAAAATTAAGCCACGTAAGGTTATTGAAGCTATGAAAGTTTTTTCAAATCCTCGATTTAATATTGATGTCTTGAAGGTGGAAGTGCCTGTCAATATGGACTATGTAGAAGGTTTTGCGCAAGGAGAGACTGCTTATAATAAAGCGACAGCTGCGGCTTATTTTAGAGAACAAGATCAGGCGACACTACTCCCCTACATTTTTTTGAGTGCAGGCGTTCCTGCTCAGCTTTTTCAAGAGACTCTTGTGTTTGCTAAAGAAGCTGGTGCTAAATTTAACGGTGTCCTTTGTGGTAGAGCAACTTGGGCTGGAAGTGTTAAAGAGTATGTTGAAAAAGGAGAAGCTGGTGCACGTCAATGGTTACGTACAATAGGTTTTCAAAATATTGATGAACTAAATAAAATTTTGCAAAAAACAGCAACTTCTTGGAAGGAAAGA

SEQ ID NO: 21846 - protein, 325 aa, Streptococcus agalactiae; identical to SEQ ID NO: 3466

SEQ ID NO: 21847 - protein, 930 aa, Streptococcus agalactiae
ATGATTTTAACAGTAACTTTGAACCCTTCTATTGATATTTCGTACTGCTTAGAAAACTTTAACATGGATACTGTAAATCGAGTTACCGACGTCTCCAAAACACCTGGGGGTAAGGGGTTAAATGTGACTCGTGTTCTTTCTCAACTTGGCGATAATGTAGTGGCAACTGGTCTATTAGGGGGGTATTTTGGAGATTTCATCCGAAGTGGCTTAGATGCATTGGAAATCAGACACCAATTTTTAAGTATTGGTGGAGAAACACGTCATTGTATTGCAGTTTTACATGAGGGTCAGCAGACTGAAATTCTAGAAAAAGGTCCACATATTACTAAAGATGAAGCAGACGCCTTTTTGAATCATCTAAAACTTATCTTTGATGCTGCAACTATCATAACAGTATCAGGAAGTTTACCAAAGGGACTCCCCTCAGATTATTATGCTAGGTTAATCTCCCTAGCGAATCACTTTAATAAGAAAGTTGTTTTAGATTGTTCAGGAGAAGCATTACGTTCGGTTTTAAAATCTAGTGCTAAGCCGACCGTCATTAAACCTAACCTTGAAGAATTAACACAATTAATTGGAAAGCCAATTAGCTATAGTTTAGATGAATTAAAATCTACCTTACAGCAAGATATTTTTAGAGGAATTGATTGGGTTATTGTTTCTTTAGGTGCTAAGGGAGCTTTTGCTAAACATGGGAATCACTACTATCAAGTGACGATTCCAAAAATAGAAGTTATTAATCCAGTTGGTTCAGGGGATGCAACGGTTGCAGGAATCGCGTCTGCTTTGGAACATCAACTAGATGATACAAACTTGCTTAAGAGAGCTAATGTCTTGGGTATGCTTAATGCACAAGAAACATTAACAGGGCATATCAATCTGACCTACTATCAAGAATTAATCAGTCAAATCCAAGTGAAAGAGGTA

SEQ ID NO: 21848 - protein, 310 aa, Streptococcus agalactiae
MILTVTLNPSIDISYCLENFNMDTVNRVTDVSKTPGGKGLNVTRVLSQLGDNVVATGLLGGYFGDFIRSGLDALEIRHQFLSIGGETRHCIAVLHEGQQTEILEKGPHITKDEADAFLNHLKLIFDAATIITVSGSLPKGLPSDYYARLISLANHFNKKVVLDCSGEALRSVLKSSAKPTVIKPNLEELTQLIGKPISYSLDELKSTLQQDIFRGIDWVIVSLGAKGAFAKHGNHYYQVTIPKIEVINPVGSGDATVAGIASALEHQLDDTNLLKRANVLGMLNAQETLTGHINLTYYQELISQIQVKEV

SEQ ID NO: 21849 - protein, 513 aa, Streptococcus agalactiae
ATGAAAATTGCGGTCGGTTGTGATCATATTGTAACTTATGACAAAATTGCAGTTGTGGATTATTTAAAAACAAAAGGGTATGAGGTTATTGATTGTGGAACTTATGATAATATCCGTACTCACTATCCTATTTATGGTAAGAAAGTAGGAGAAGCTGTCGCTAGTGGAAAAGCCGACTTAGGTGTATGTATTTGTGGAACTGGAGTTGGTATTAATAATGCTGTTAATAAAGTTCCAGGAATTCGCTCAGCTCTGGTACGTGATTTGACATCAGCTATCTATGCTAAAGAAGAATTAAATGCTAACGTTATCGGATTTGGTGGGAAAATTACTGGTGGTTTGTTAATGACAGATATCATCGAGGCATTTATAAGAGCTAAATATAAACCAACAAAAGAAAACAAAGTATTAATTGAAAAGATAGCCGAGGTTGAGACTCATAATGCCCATCAAGAAGAGAATGACTTTTTCACAGAGTTCTTAGATAAATGGAATCGTGGTGAATATCACGAC

SEQ ID NO: 21850 - protein, 171 aa, Streptococcus agalactiae; identical to SEQ ID NO: 3474

SEQ ID NO: 21851 - protein, 423 aa, Streptococcus agalactiae; identical to SEQ ID NO: 8153

SEQ ID NO: 21852 - protein, 141 aa, Streptococcus agalactiae; identical to SEQ ID NO: 8154

SEQ ID NO: 21853 - protein, 2151 aa, Streptococcus agalactiae
ATGGTAATAGTCTTAGGTGATTCTGACAGTCAAGAAAAATTGTCATCTCCTCTAAAAGCGGAAATAGCAACAGAAGAAAATCGTAAACAGGCAAATTTAGCAGAACTAAATGTAACTCAAGCTGATAATAGAACTACCTATATTATACCCGAAAGCAGTCATTCCATTGCAGAACAACAGAGATTCCTGATAGAATCAAAGGGTTCTTCGGTTGCATTACTTAATAGCGCTGAATTTAGAAAGACAGCGGGAGAGGATAGAGGTTTTGAAAGGGATAAGTTGAGGTCTTTGGATATCATTCCTAAGGGAGATTTATCGACAAGTAATGTCATAGGTAATACGGACATTGCTAGTCAGATATCGTTGGGCTTTAAAAAGAATGCGATACAGGAACACCATCTTACTAAAACATTCTCTCAAAAGGATGGAAAGTTATCGTCTGTTATAGAGGGGATGCTTGCTATTGGCAAAGAGAAAGTAGAGAAGGAAATAAAATATAGTGGTAATTTATGGCAAAAATTAAAAGCTAAGGCACACTGCCTTGTTTGCTGTGTTGATAATTTGAATTTTGAAGATATAAAATCTTATTTTCAATATTATTGTCATCTAAACCATCAGCTCAAATTACCTAAAGGTGCTATACTTTCTGCTAAAACAGAAGTATATAGGGGAGGAGATTTTGGGAGAAAAAATAAAGATAATGTGTTTGGTTACCGTATCCCCTCATTATTAAAAACGGAAAAAGGAACTTTACTTGCGGGAGCTGATGAAAGAATTGAGCAAGCTTGTGATTGGGGAAACATAGGAATGGTTATTCGCCGTAGTGAGGATGATGGTGTCACTTGGGGAAAAAGAGAAACTATTGTCAATCTCCGTAATAACCCTAGAGTTCCGCTAGTTACTAGTGGTGACTATAGTGGCTCACCTATTAATATGGATATGGCATTAGTTCAAGATACTAGCTCTAAGACGAAACGTATTTTTTCAATATATGATATGTTTCCAGAAGGAAGAGGCGTTATTAGTATTGCTAACACACCTGAAAAAGAATATACCCAAATCGGAGGACAGTCTTATCTTAATTTATATAATAATGGAAAGAAATCGAAGGTTTTTACTATCCGTGACAAAGGTATTGTATATAATTTTAAAGGGAAAAAGACTGATTATCATGTTATAACAGAAACTACTAAAAGTGACCATTCAAATCTAGGGGATATTTATAAGGGAAAACAGCTACTTGGAAATATATATTTTACAAAACATAAAACGTCACCATTTCGTTTAGCAAAATCAAGCTATGTGTGGATGTCATATAGCGATGATGATGGTAGGACATGGTCATCACCTAGAGATATAACAGCAAGTCTTCGTCAGAGAGGCATGAAATTTTTGGGAATAGGGCCTGGAAAAGGTATAGTTTTAAAATGGGGGCCACACGCTGGTCGTATTATTATTCCTGCCTATTCTACGAATTGGAAATCTCATCTAAGAGGTTCACAATCTTCACGCCTAATTTATTCAGACGACCATGGAAAAACGTGGCATACTGGAAAAGCAGTCAATGATAACCGTATACTTTCTAATGGTGAAAAAATTCACTCCTTAACAATGGATAATAAAAAAGAACAAAATACAGAATCCGTACCCGTTCAATTGAAAAATGGGGACATTAAGTTATTTATGAGGAATCTAACTGGTAACCTAGAAGTAGCCACAAGTAAAGACGGCGGGGAGACTTGGCAAAACCATGTTAAACGATATAAGGAAATTCATGATGCTTACGTCCAACTATCAGCTATTCGCTTTGAGCATGACAAAAAAGAGTATATTTTATTAGTGAATGCTAATGGGCCAGGGAAGAAGCGCCAAGATGGATATGCACGTCTAGCGCAAGTTAATCGAAATGGTAGTTTTAAGTGGTTATATCACCATCACATTCAAGATGGTTCGTTTGCTTACAACTCTGTTCAACAACTTAATAATGATCAATTTGGTGTCCTTTATGAACATAGAGAAAAACATCAAAATAGTTTTACTTTAAATTACAAAGTTTTTAATTGGAGTTTTCTTAGTCAAAATACAGAGAAGCAAGGCACTTTATGGGAGAAAATGGCAGCAAATTGGCATGTTTTGTTTAAATTTTATTTA

SEQ ID NO: 21854 - protein, 717 aa, Streptococcus agalactiae
MVIVLGDSDSQEKLSSPLKAEIATEENRKQANLAELNVTQADNRTTYIIPESSHSIAEQQRFLIESKGSSVALLNSAEFRKTAGEDRGFERDKLRSLDIIPKGDLSTSNVIGNTDIASQISLGFKKNAIQEHHLTKTFSQKDGKLSSVIEGMLAIGKEKVEKEIKYSGNLWQKLKAKAHCLVCCVDNLNFEDIKSYFQYYCHLNHQLKLPKGAILSAKTEVYRGGDFGRKNKDNVFGYRIPSLLKTEKGTLLAGADERIEQACDWGNIGMVIRRSEDDGVTWGKRETIVNLRNNPRVPLVTSGDYSGSPINMDMALVQDTSSKTKRIFSIYDMFPEGRGVISIANTPEKEYTQIGGQSYLNLYNNGKKSKVFTIRDKGIVYNFKGKKTDYHVITETTKSDHSNLGDIYKGKQLLGNIYFTKHKTSPFRLAKSSYVWMSYSDDDGRTWSSPRDITASLRQRGMKFLGIGPGKGIVLKWGPHAGRIIIPAYSTNWKSHLRGSQSSRLIYSDDHGKTWHTGKAVNDNRILSNGEKIHSLTMDNKKEQNTESVPVQLKNGDIKLFMRNLTGNLEVATSKDGGETWQNHVKRYKEIHDAYVQLSAIRFEHDKKEYILLVNANGPGKKRQDGYARLAQVNRNGSFKWLYHHHIQDGSFAYNSVQQLNNDQFGVLYEHREKHQNSFTLNYKVFNWSFLSQNTEKQGTLWEKMAANWHVLFKFYL

SEQ ID NO: 21855 - protein, 1445 aa, Streptococcus agalactiae
ATGCAGGTATTTTTAAATATTGTCAATAAATTCTTTGATCCAATTATCCATATGGGTTCGGGAGTTGTGATGCTAATTGTCATGACAGGTTTAGCCATGATATTTGGAGTGAAGTTTTCTAAAGCACTTGAAGGTGGTATTAAGTTAGCTATTGCTCTTACGGGTATTGGTGCTATTATTGGTATTTTAACTGGTGCTTTTTCCGAATCACTTCAAGCTTTTGTTAAAAATACAGGAATCAATCTAAGCATTATTGACGTTGGTTGGGCTCCATTAGCAACTATTACATGGGGATCACCATATACGCTTTACTTCTTATTAATCATGCTTATTGTCAATATTGTTATGATTGTTATGAAAAAAACGGATACCTTAGATGTTGATATTTTTGATATTTGGCATTTATCTATCACAGGTCTTTTAATTATGTGGTATGCTAAAAAAAATAATCTACCAACACTTTTATCTGTCATTATTGCAACTGTAGCTATTATCTTCGTTGGTGTTCTAAAAATTATCAATTCTGATTTGATGAAACCTACCTTTGATGATTTATTGGGGACAGGTACAACTTCTCCCATGACTTCAACGCATATGAATTATATGATGAACCCCATTATTATGGTTTTGGATAAGCTTTTTGATAAAGTTTTTCCAGGGCTAGATAAATATGACTTTGACGCGGCTAAATTAAATAAAGCCATTGGATTCTGGGGATCTAAGTTCTTTATTGGTATGATTTTAGGACTTGTCATAGGGATTATGGGCAACCCCGTGTTCTCATTTGCAGCATTAGGTGGCTGGTTTTCTCTCGGTTTTACAGCAGGTGCTTGTTTAGAGTTGTTCTCTTTGATTGGTTCTTGGTTCATTGCTGCAGTAGAACCACTTTCTCAAGGAATTACTAATTTTGCTAATGGTAAAATGCATGGTCGTCGTTTCAATATTGGTTTGGACTGGCCATTTATTGCCGGACGTGCAGAGATTTGGGCATGTGCTAACATTCTTGCACCGATTATGCTAGTAGAAGCTATTTTACTCTCTAAAGTTGGTAATGGTATTCTACCGCTTGCCGGTATTATCGCAATGGGCGTAACCCCTGCTTTGCTGGTTGTTACACGTGGCCGTTTAATTCGTATGATTACCTTTGGAACATTGCTATTACCGCTATTCCTTTTATCAGGAACAATGATTGCTCCATTTGCAACTGAATTAGCTAAAAAGGTAGGCGCATTCCCAGCTGGGGCGCGAGCAGGTTCACTTATCACTCACTCTACACTAGAAGGCCCTATGGAGAAATCTTTGGTTACGTTATTGGTAAAGCGACAACAGGTCAATTATCAGCGATTATAACATTAATTATTTTTGCGACAGCTTATCTTGGTTTGTTTATGTGGTATGCTAAACAAATGAAACGCCGTAATGCAGAATATGCAGCTAATCAAAAA

SEQ ID NO: 21856 - protein, 482 aa, Streptococcus agalactiae
  VARIANT 432: Xaa = Any Amino Acid
MQVFLNIVNKFFDPIIHMGSGVVMLIVMTGLAMIFGVKFSKALEGGIKLAIALTGIGAIIGILTGAFSESLQAFVKNTGINLSIIDVGWAPLATITWGSPYTLYFLLIMLIVNIVMIVMKKTDTLDVDIFDIWHLSITGLLIMWYAKKNNLPTLLSVIIATVAIIFVGVLKIINSDLMKPTFDDLLGTGTTSPMTSTHMNYMMNPIIMVLDKLFDKVFPGLDKYDFDAAKLNKAIGFWGSKFFIGMILGLVIGIMGNPVFSFAALGGWFSLGFTAGACLELFSLIGSWFIAAVEPLSQGITNFANGKMHGRRFNIGLDWPFIAGRAEIWACANILAPIMLVEAILLSKVGNGILPLAGIIAMGVTPALLVVTRGRLIRMITFGTLLLPLFLLSGTMIAPFATELAKKVGAFPAGARAGSLITHSTLEGPMEXIFGYVIGKATTGQLSAIITLIIFATAYLGLFMWYAKQMKRRNAEYAANQK

SEQ ID NO: 21857 - protein, 303 aa, Streptococcus agalactiae
ATGATCAAAATATTAGCAGCTTGTGGTGCAGGCGTAAACTCAAGTCATCAAATTAAAGATGCTATCGAGACACAATTAGGAGATAGAGGTTACAATGTACATTGTGATGCTGTTATGGTTAAGGATATCACTGAGGAAATGGTCAACAAATATGATATCTTTACTCCTATTGCTAAAACTGATTTAGGTTTTAATGTACCAATTCCAGTTGTAGAAGCAGGACCTATTCTTTATCGCATACCAGTTATGAGCGAACCGGTCTTTACTGCTTTAGAACAAGTTATCAAAGAACACAACCTATCA

SEQ ID NO: 21858 - protein, 101 aa, Streptococcus agalactiae; identical to SEQ ID NO: 3482

SEQ ID NO: 21859 - protein, 462 aa, Streptococcus agalactiae
GTGACTCAAGATATTTTATTTATTGATGCTCATTCTCAGGAAGAATTATTTGACTTAGTATCAAAAGCATTGATAAAACAACACTATGTTAGTCCTGACTACCGACAGGCAGTAAAAGAAAGGGAGAGAGAGTTTCCAACGGGGTTAAAAATTGATTTAAAAGATGGGACTCCTATTCAATATGCTGCTATTCCACACACTGAAACGCAGTATTGTCTAGTAGATAGAATCTTTTATGTCAAAAATAGTCAGCCAATTACTTTCAAACATATGATTAATCCAGAAGAGGAGTGTAGGGTTCAGGATTTTTTCTTCATCATTAATAGTAGGAATAGTAACCAAAGTGATATTTTATCTAATTTGATTACCTTCTTTATTACAAAAGGAAACCTAGATCGGCTACATGAGCTTGGCGACAATAAAGAAAAAATTAATCATTATTTAATAGAAAAAGGAGTGTTT

SEQ ID NO: 21860 - protein, 154 aa, Streptococcus agalactiae
MTQDILFIDAHSQEELFDLVSKALIKQHYVSPDYRQAVKEREREFPTGLKIDLKDGTPIQYAAIPHTETQYCLVDRIFYVKNSQPITFKHMINPEEECRVQDFFFIINSRNSNQSDILSNLITFFITKGNLDRLHELGDNKEKINHYLIEKGVF

SEQ ID NO: 21861 - protein, 774 aa, Streptococcus agalactiae
ATGTTAAAGCGAGAAAGATTACAAAAAATAATAGAAAAAGTCAATATAAATGGTATTGTCACTGTTAATGAAATCATGGAAGAACTTGATGTATCAGACATGACTGTTAGGCGTGACTTGGATGAATTAGATAAAGCAGGACTGTTAATACGCATCCATGGTGGTGCACAAAAAGTAAATGCATCACCAACTCCACAAAATTATGAAAAATCAAACACTGAAAAATACGATATTCAAACAAATGAAAAATTAGAAATTGCCCAATTTGCAAAACAATTCATCAATGATGGTGAAACAATCTTTATTGGGCCTGGAACAACCTTAGAGAAATTAGCTACGCAATTACTTGATTTTAAAATTAGGATAGTAACCAATAGCCTTCCTGTTTTCAATATTCTGAATCAAAGTTCAACACTTGACCTTATCCTTGTAGGAGGAGAATACAGAGAAATTACTGGTGCTTTTGTCGGTTCTGTTACTATTAACTCTATTAAATCACTTAATTTTTCAAAAGCTTTTGTTAGTAGTAATGGTGTTTTTGAAAAGTCTATCGCTACTTATGACGAGGGAGAAGGTGAAATCCAGCGCATTGCTCTTAATAATTCCTTTGAAAAATTCCTTTTAGTTGATAGCCAAAAATTTGGTAAATATGATTTTTATACTTTTTATCAATTAGACGATATTGATTTTGTATTAACAGATCATAATATTGATAATGTTGTTAAGGAGCAATACAGTAGCTTCACCAAAATTTTAACTAATAACAATTACATG

SEQ ID NO: 21862 - protein, 258 aa, Streptococcus agalactiae
MLKRERLQKIIEKVNINGIVTVNEIMEELDVSDMTVRRDLDELDKAGLLIRIHGGAQKVNASPTPQNYEKSNTEKYDIQTNEKLEIAQFAKQFINDGETIFIGPGTTLEKLATQLLDFKIRIVTNSLPVFNILNQSSTLDLILVGGEYREITGAFVGSVTINSIKSLNFSKAFVSSNGVFEKSIATYDEGEGEIQRIALNNSFEKFLLVDSQKFGKYDFYTFYQLDDIDFVLTDHNIDNVVKEQYSSFTKILTNNNYM

SEQ ID NO: 21863 - protein, 2580 aa, Streptococcus agalactiae
ATGAATCGTAAAAAAACAGTTATTATTAGTGCTTTATCAGTAGCTCTATTTGGTACTGGTGTAGGTGCTTACCAATTAGGTAGCTATAATGCCCAAAAATCAGACAATAGTGTTTCTTATGTGAAAACAGATAAATCTGATAGCAAAGCACAAGCAACAGCTGCAAATAAAACGCCCGACCAAATCAGTAAAGAAGAAGGCATATCTGCAGAACAAATCGTTGTTAAAATTACTGATGATGGTTATGTAACTTCTCATGGAGACCATTACCATTATTACAATGGGAAAGTGCCATATGATGCCATCATTAGTGAAGAATTGATTATTAAAGACCCTAGCTATGTCTTTAATAAAGCTGATGTCATTAATGAAGTCAAAGATGGTTATATTATCAAAGTTAATGGTAAGTATTACCTCTATCTTAAAGAAGGTAGCAAACGAACAAATGTTCGTACAAAGGAACAAATCCAAAAGCAACGCGAAGAATGGTCTAAGGGTGGTTCTAAGGGAGAATCAGGAAAGCATAGTAGTGCAAAAACTCAAGCTTTATCAGCCAGCGTACGTGAAGCGAAAGCTAGTGGTCGCTATACTACAGATGATGGTTATGTTTTTAGTCCAACAGATGTCATTGATGACATGGGAGATGCCTTTTTAGTACCACATGGCGATCATTTCCATTATATCCCGAAAGCTGATTTATCTCCATCAGAGTTATCAGCCGCACAAGCATATTGGAACCGCAAGACTGGCCGAGCAGGTAATAGCTCAAAACCATCAAATTCAAGTTCATACATTCACGCAAGTGCACCAAGCGGTAATGTATCAACAGGAAGACATGCTAATGCCCCTATTTCTATTCCAAGAGTCACTCACGCAAATCACTGGTCAAAACCAGCTGGTAATCATGCTACGGCACCAAAACACCATGCACCTACAACCAAACCAATCAACAAAGATTCTGCTTTAGACAAAATGTTGAAACGTTTATATGCTCAACCGTTATCTGCTCGTCACGTAGAAAGTGATGGTTTGGTTTATGACCCAGCACAAGTTAATGCTTTCACAGCAATCGGTGTTTCTATTCCGCACGGTAATCATTTCCACTTTATTCACTATAAGGATATGTCTCCATTAGAGTTAGAAGCAACAAGGATGGTGGCAGAGCATAGAGGACATCATATTGATGCATTAGGGAAAAAAGATTCTACAGAGAAACCAAAGCATATTTCTCATGAACCTAATAAGGAACCTCACACAGAGGAAGAACACCATGCAGTAACACCGAAAGACCAACGTAAAGGCAAACCAAATAGCCAGATTATCTACAGTGCTCAAGAAATTGAAGAGGCAAAAAAAGCTGGTAAATACACAACATCTGATGGTTACATTTTTGATGCCAAAGATATTAAAAAAGATACAGGTACAGGTTATGTCATTCCACATATGACACATGAGCATTGGGTACCAAAGAAAGATTTATCAGAGTCGGAATTAAAAGCAGCTCAAGAATTTCTTTCAGGAAAATCTGAAGCAAATCAAGACAAACCAAAAACAGGTAAAACAGCTCAAGAAATCTATGAGGCAATTGAACCAAAAGCAATTGTTAAACCTGAAGATTTATTATTTGGAATTGCACAAGCGACAGACTATAAGAATGGTACATTTGTAATTCCTCATAAAGATCATTACCATTATGTGGAATTAAAATGGTTTGATGAAGAAAAAGATCTTTTAGCTGATTCAGATAAGACATATTCTTTAGAAGACTATTTAGCTACGGCTAAATATTACATGATGCACCCAGAAAAACGTCCTAAAGTTGAAGGATGGGGTAAAGATGCTGAAATTTATAAGGAAAAGGACTCTAATAAAACAGATAAACCAAGTCCTGCACCAACTGATAATAAATCAACATCAAATTCTAGTGATAAAAACTTAAGTGCTGCAGAAGTATTCAAACAAGCAAAACCAGAAAAAATTGTACCGCTTGATAAAATTGCTGCTCACATGGCATATGCAGTTGGATTTGAAGATGATCAATTGATTGTTCCTCATCATGATAATTATCATAATGTTCCTATGGCATGGTTTGACAAGGGTGGTTTATGGAAAGCACCAGAAGGCTATACATTACAACAACTCTTCTCAACAATTAAATACTACATGGAACATCCTAATGAATTACCAAAAGAAAAAGGTTGGGGACACGACAGTGATCATAACAAAGGCTCAAATAAAGACAATAAAGCCAAAAATTATGCTCCAGATGAAGAACCTGAAGATTCAGGGAAAGTAACTCACAACTATGGTTTTTATGATGTTAATAAAGGTTCAGACGAAGAAGAACCAGAAAAACAAGAAGATGAATCAGAGCTAGATGAATATGAACTAGGAATGGCACAAAACGCTAAGAAATATGGTATGGATAGACAATCTTTTGAAAAGCAACTCATCCAATTATCAAATAAATATAGTGTAAGTTTTGAAAGCTTTAATTATATTAATGGTAGTCAAGTTCAAGTTACTAAAAAAGATGGCTCTAAAGTGCTTGTTGATATTAAAACACTAGCAGAAGTGAAA

SEQ ID NO: 21864 - protein, 860 aa, Streptococcus agalactiae
MNRKKTVIISALSVALFGTGVGAYQLGSYNAQKSDNSVSYVKTDKSDSKAQATAANKTPDQISKEEGISAEQIVVKITDDGYVTSHGDHYHYYNGKVPYDAIISEELIIKDPSYVFNKADVINEVKDGYIIKVNGKYYLYLKEGSKRTNVRTKEQIQKQREEWSKGGSKGESGKHSSAKTQALSASVREAKASGRYTTDDGYVFSPTDVIDDMGDAFLVPHGDHFHYIPKADLSPSELSAAQAYWNRKTGRAGNSSKPSNSSSYIHASAPSGNVSTGRHANAPISIPRVTHANHWSKPAGNHATAPKHHAPTTKPINKDSALDKMLKRLYAQPLSARHVESDGLVYDPAQVNAFTAIGVSIPHGNHFHFIHYKDMSPLELEATRMVAEHRGHHIDALGKKDSTEKPKHISHEPNKEPHTEEEHHAVTPKDQRKGKPNSQIIYSAQEIEEAKKAGKYTTSDGYIFDAKDIKKDTGTGYVIPHMTHEHWVPKKDLSESELKAAQEFLSGKSEANQDKPKTGKTAQEIYEAIEPKAIVKPEDLLFGIAQATDYKNGTFVIPHKDHYHYVELKWFDEEKDLLADSDKTYSLEDYLATAKYYMMHPEKRPKVEGWGKDAEIYKEKDSNKTDKPSPAPTDNKSTSNSSDKNLSAAEVFKQAKPEKIVPLDKIAAHMAYAVGFEDDQLIVPHHDNYHNVPMAWFDKGGLWKAPEGYTLQQLFSTIKYYMEHPNELPKEKGWGHDSDHNKGSNKDNKAKNYAPDEEPEDSGKVTHNYGFYDVNKGSDEEEPEKQEDESELDEYELGMAQNAKKYGMDRQSFEKQLIQLSNKYSVSFESFNYINGSQVQVTKKDGSKVLVDIKTLAEVK

SEQ ID NO: 21865 - protein, 918 aa, Streptococcus agalactiae
ATGAAAAGGATACGGAAAAGCCTTATTTTTGTTCTCGGAGTAGTTACCCTAATTTGCTTATATGCTTGTACTAAACAGAGCCAGCAAAAAAATGGCTTGTCGGTCGTGACTAGCTTTTATCCAGTATATTCCATTACAAAAGCAGTTTCTGGTGATTTGAATGATATTAAAATGATTCGATCACAGTCAGGCATTCATGGTTTTGAACCCTCATCAAGTGATGTTGCTGCCATTTATGATGCTGATCTATTTCTTTATCATTCGCACACACTCGAAGCTTGGGCGAGACGTTTGGAACCTAGTTTGCATCACTCTAAAGTATCTGTAATTGAAGCTTCAAAGGTATGACTTTGGATAAAGTCATGGCTTAAAGATGTAGAGGCAGAAAAAGGAGTAGATGAGTCAACCTTGTATGACCCTCACACTTGGAATGACCCTGTAAAAGTATCTGAGGAAGCACAACTCATCGCTACACAATTAGCTAAAAAGGATCCTAAAAACGCTAAGGTTTATCAAAAAAATGCTGATCAATTTAGTGACAAGGCAATGGCTATTGCAGAGAAGTATAAGCCAAAATTTAAAGCTGCAAAGTCTAAATACTTTGTGACTTCACATACAGCATTCTCATACTTAGCTAAGCGATACGGATTGACTCAGTTAGGTATTGCAGGTGTCTCAACCGAGCAAGAACCTAGTGCTAAAAAATTAGCCGAAATTCAGGAGTTTGTGAAAACATATAAGGTTAAGACTATTTTTGTTGAAGAAGGAGTCTCACCTAAATTAGCTCAAACAGTAGCTTCAGCTACTCGAGTTAAAATTGCAAGTTTAAGTCCTTTAGAAGCAGTTCCCAAAAACAATAAAGATTACTTAGAAAATTTGGAAACTAATCTTAAGGTACTTGTCAAATCGTTAAATCAA

SEQ ID NO: 21866 - protein, 307 aa, Streptococcus agalactiae
  VARIANT 125: Xaa = Any Amino Acid
MKRIRKSLIFVLGVVTLICLYACTKQSQQKNGLSVVTSFYPVYSITKAVSGDLNDIKMIRSQSGIHGFEPSSSDVAAIYDADLFLYHSHTLEAWARRLEPSLHHSKVSVIEASKGMTLDKVHGLXDVEAEKGVDESTLYDPHTWNDPVKVSEEAQLIATQLAKKDPKNAKVYQKNADQFSDKAMAIAEKYKPKFKAAKSKYFVTSHTAFSYLAKRYGLTQLGIAGVSTEQEPSAKKLAEIQEFVKTYKVKTIFVEEGVSPKLAQTVASATRVKIASLSPLEAVPKNNKDYLENLETNLKVLVKSLNQ

SEQ ID NO: 21867 - protein, 441 aa, Streptococcus agalactiae
ATGAAAATCATTATTCAACGTGTTAATCAAGCAAGTGTTTCTATTGAAGATGATGTAGTCGGATCTATTGAGAAGGGTTTAGTACTTCTAGTTGGGATTGCTCCAGAAGATACAACAGAAGATATTGCTTATGCAGTTCGTAAAATTACTAGCATGCGTATTTTTTCTGATGATGAGGGGAGAATGAACCTTTCAATTCAAGACATTAAAGGAAGCGTCTTATCTATCTCACAATTTACACTCTTTGCAGATACCAAAAAAGGAAATCGTCCAGCTTTTACTGGGGCAGCTGACCCTGTTAAAGCGAATCAGTTTTATGATATCTTTAATCAAGAATTAGCAAATCATGTTTCGGTAGAAACAGGTCAATTTGGAGCTGATATGCAAGTCAGTCTGATTAATGATGGACCAGTAACTATCGTTTTAGATACTAAAAATAAA

SEQ ID NO: 21868 - protein, 147 aa, Streptococcus agalactiae
MKIIIQRVNQASVSIEDDVVGSIEKGLVLLVGIAPEDTTEDIAYAVRKITSMRIFSDDEGRMNLSIQDIKGSVLSISQFTLFADTKKGNRPAFTGAADPVKANQFYDIFNQELANHVSVETGQFGADMQVSLINDGPVTIVLDTKNK

SEQ ID NO: 21869 - protein, 2156 aa, Streptococcus agalactiae
ATGAGTGAGACGGATGTTGCTTTTGTAAAATTTGCCTTAAATTACGCAACCGCAGCTCATTATTATCAAGCAAGAAAGTCGGGCGAGCCCTACATTATTCATCCAATCCAAGTAGCAGGTATTCTTGCAGATTTACACCTTGATGCCGTTACGGTAGCTTGTGGTTTTTTACATGATGTTGTAGAAGATACGGAAATTACCCTTGATGAGATTGAAACTGATTTTGGCAAGGATGTTCGCGATATTATTGACGGTGTAACAAAATTGGGTAAAGTGGAGTACAAATCTCATGAAGAACAGTTAGCAGAAAATCACCGTAAAATGTTAATGGCTATGTCTAAGGATATCCGTGTTATTTTGGTTAAGCTCGCTGATCGCTTACATAATATGAGAACCCTTAAACACCTCAGAAAAGATAAACAAGAGCGTATTTCACGTGAGACTATGGAAATATACGCTCCTTTAGCGCATCGTTTGGGGATTAGTCGTATCAAGTGGGAATTAGAAGATTTATCTTTTCGTTACTTGAATGAGACGGAATTTTATAAGATTTCTCATATGATGAGTGAAAAACGTCGTGAACGTGAAGAGTTGGTTGATATAATTGTCGATAAAATCAGATCCTATACTGAGGAACAGGGTTTATATGGTGATATTTATGGTAGACCAAAACACATTTATTCTATTTACAGAAAAATGCGTGATAAAAAGAAACGCTTTGATCAGATTTATGATTTAATTGCGATACGCTGTATCATGGAAACTGCTAGTGATGTTTATGCCATGGTGGGGTATATCCATGAGTTATGGCGTCCTATGCCAGGAAGGTTTAAAGATTATATTGCGGCACCAAAGGCCAATGGTTATCAATCTATTCACACGACGGTTTATGGACCTAAAGGGCCAATTGAAATTCAGATTCGAACTAAAGAAATGCATCAAGTTGCCGAGTTTGGTGTTGCAGCCCATTGGGCCTATAAAAAAGGAATCACCAGTAAGGTTAATCAAGCAGAGCAATCGGTTGGTATGGGATGGATTCAAGAATTAGTTGAGCTTCAAGATGAATCAAAAGACGCCAAGGATTTTGTTGACTCTGTTAAGGAAGATATCTTTACAGAACGCATCTATGTTTTTACCCCAATGGTGCTGTTCAGGAATTGCCAAGGGAATCTGGACCAATTGATTTTGCTTATGCTATTCACACGCAAGTTGGAGAAAAAGCTACTGGCGCTAAAGTAAATGGACGTATGGTTCCATTGACTGCTAAGTTAAAAACAGGAGATGTTGTTGAGATTATCACAAACCCTAATTCATTTGGACCAAGTCGTGACTGGATTAAGATTGTTAAGACCAATAAAGCTCGCAATAAAATTCGTCAGTTCTTCAAAAACCAAGATAAAGAAACTTCTATTAATAAAGGTAGAGAATTACTGGTTGATTATTTCCAAGAACAAGGTTATGTGCCTAACAAATATTTAGATAAGAAACATATTGAAGAAATCCTTCCACGTGTCAGTGTTAAAAGTGAGGAAGCTTTGTATGCAGCCGTAGGTTTTGGTGATTTGAGTCCGATTAGTATTTTTAATAAACTGACGGAAAAAGAACGCCGTGAGGAGGAACGTGCTAAGGCTAAAGCGGAAGCAGACGAACTTATTAACGGTGGTGAAATCAAAACCGATAAGCGTGATGTTCTCAAAGTTAAGAGTGAAAATGGTGTTATCATTCAAGGAGCTTCAGGTTTATTAATGCGTATTGCAAAATGTTGTAATCCCGTTCCTGGAGATCTCATTGAAGGCTATATAACTAAAGGTAGAGGCGTGGCTATCCATCGTTCAGATTGTCAAAATTTAAAGAGTCAGGAGAACTACGAACAACGTTTGATTGATGTTGAGTGGGACGATGATGGATCTAAAAAAGAGTACATGGCTGAAATCGATATTTATGGTTTGAACCGTAGTGGCCTCCTTAATGATGTTCTTCAAACCTTATCAAATGCAACAAAGCTAGTATCAACAGTAAATGCACAACCAACAAAAGATATGAAATTTGCTAATATTCATGTTAGCTTTGGAATTTCAAATTTAGCACAATTGACAACTGTGGTTGATAAAATCAAAATTATCCCAGATGTTTATTCTGTTAAACGTACGAATGGT

SEQ ID NO: 21870 - protein, 719 aa, Streptococcus agalactiae
MSETDVAFVKFALNYATAAHYYQARKSGEPYIIHPIQVAGILADLHLDAVTVACGFLHDVVEDTEITLDEIETDFGKDVRDIIDGVTKLGKVEYKSHEEQLAENHRKMLMAMSKDIRVILVKLADRLHNMRTLKHLRKDKQERISRETMEIYAPLAHRLGISRIKWELEDLSFRYLNETEFYKISHMMSEKRREREELVDIIVDKIRSYTEEQGLYGDIYGRPKHIYSIYRKMRDKKKRFDQIYDLIAIRCIMETASDVYAMVGYIHELWRPMPGRFKDYIAAPKANGYQSIHTTVYGPKGPIEIQIRTKEMHQVAEFGVAAHWAYKKGITSKVNQAEQSVGMGWIQELVELQDESKDAKDFVDSVKEDIFTERIYVFTPNGAVQELPRESGPIDFAYAIHTQVGEKATGAKVNGRMVPLTAKLKTGDVVEIITNPNSFGPSRDWIKIVKTNKARNKIRQFFKNQDKETSINKGRELLVDYFQEQGYVPNKYLDKKHIEEILPRVSVKSEEALYAAVGFGDLSPISIFNKLTEKERREEERAKAKAEADELINGGEIKTDKRDVLKVKSENGVIIQGASGLLMRIAKCCNPVPGDLIEGYITKGRGVAIHRSDCQNLKSQENYEQRLIDVEWDDDGSKKEYMAEIDIYGLNRSGLLNDVLQTLSNATKLVSTVNAQPTKDMKFANIHVSFGISNLAQLTTVVDKIKIIPDVYSVKRTNG

SEQ ID NO: 21871 - protein, 2400 aa, Streptococcus agalactiae
ATGTCAAAACATTATTTTTCAAAAAGCGTATTCGCTTTAACTGTCTTAACAGCTACAGCAACAAGTGGTTTAGCTGTTCAAGCAGAAGACATTGTTACAACACCAAGTTCAACCGCTACAAAGGTTGAATCAACTACCCCCACTAGCACAATTGCAGAAGAAAAGTCAAACGTTACTTCTACTCCAACTGCAATAACTGATGCTTCAACAGCCACAAGCACAAATACCACTACCAATAACCAAAATCCACAGCCTGTTGCCACAGAAGCCACAACTAGTGATCTCAAACCTATTGAAGGTGAAAAAGTTGACCTTCGCATCATGTCAACCACAGACCTACACACCAATTTAGTTAACTATGATTATTATCAAGATAAAGAATCTCAAAAAATAGGGTTAGCAAAAACTGCTGTCCTTATCGAAGAAGCAAAAAAAGAAAATCCTAATACCGTCTTAGTTGATAACGGAGATGTCATTCAAGGGACACCTTTAGGAACTTATAAAGCAATCGTTAAACCTGTCGCAGAAAATGAAGAACATCCTATGTACCAAGCCATGAATGCTCTTGGTTATGATGCATCAACACTAGGTAATCATGAGTTTAATTACGGTTTAGATTACCTCAAAAAAATCATTGCTACAGCCAACCTTCCAATCCTCAACGCAAATGTTTTGGATTTCAAAACACATCAACCAGTTTTTAAAACTTATGACATCATTACTAAAACCTTCAAAGATTCAACAGGAAGATCTGTTGCACTAAATATTGGAATTACAGGAATTGTACCTCCTCAAATCTTAAACTGGGACAAGGCTAACCTAGAAGGAAAGGTTACTGTCAAAGATTCAGTTAAAGCAATCGAAGAAATCGTTCCTACTATGCGTGCTAAAGGAGCAGATGTCATTCTCGTTTTATCACACTCTGGCATTGGAGATGATCGATATGAAGAAGGTGAAGAAAACGTTGGCTATCAAATTGCCAGCATCAAGGGAGTGGATGCCGTTGTTACGGGACACTCACACGCTGAATTTCCATCAGGTAACGGTACTGGCTTCTATGAAAAATACACTGGAGTTGATGGTATCAATGGAAAAATAAATGGAACACCTGTTACAATGGCAGGCAAGTACGGGGATCATCTTGGTATTATTGATTTAGGACTTAGTTATACTAATGGAAAATGGCAAGTCTCCGAAAGTAGTGCTAAAATCCGTAAAATTGATATGAACTCAACAACTGCTGACGAGCGTATCATTGCATTGGCTAAGGAAGCACACGATGGCACAATCAACTATGTTCGCCAACAAGTAGGTACAACAACTGCGCCAATTACAAGTTACTTTGCACTAGTTAAAGATGATCCTTCAGTTCAAATTGTTAACAACGCTCAACGTTGGTACGTTGCAAATGAATTGAAAGGAACACCTGAGGCAAATTTACCACTTCTATCTGCTGCAGCACCATTTAAAGCTGGAACACGTGGCGATGCTACCGCATATACTGATATTCCAGCTGGACCTGTTGCAATTAAAAACGTAGCTGATCTTTACCTTTATGATAATGTTACTGCACTTTTAAAAGTGACCGGAGCAGACTTACGTGAATGGTTAGAAATGTCCGCTGGTCAATTTAACCAAATTGACCCTAACAATAAAGCACCACAAAATATTATCAATACCGAATATCGTACCTATAATTTTGACGTTATTGACGGCTTGACTTATAAATTTGATATTACACAACCTAATAAATACAATAAAGATGGAAAAGTTGTTAATAGTCAAGCTAGTCGAGTACGCGATTTAATGTACAATGGTAAGCCCGTTGCAGACAAACAAGAGTTTATGATTGTGACCAATAACTACCGTGCTAGTGGTACCTTCCCTGGGGCTAAAAATGCCACAATGAACCGTTTGCTTAACTTAGAAAATCGCCAAACTATTATCAACTATATTATTTCAGAGAAAACCATCAATCCTACAGCTGATAATAACTGGGGCTTCACAGAGTCTATTAAAGGCCTTGATTTACGATTCCAAACAGCCGATAAAGCTAAAAATCTTGTTACTAATAGCAAGGATATTCAGTATATCGCTAGTTCTACCAAAGATGAAGGATTTGGTGATTATCGATTTGTCTATACTGAACAAGAAAAAATAGACCTTACTGAGCCATCACATCAAGAAAAGTTAAGCCAAATAGAAAAACAAAAAATTCACCACATGGTTGCAACTGCTTATACAAAAGCAAAAGCTTCTCCAAATATCGCAGGCACTGTCTATACACAACAGAAAGAAAAAACATTACCTAAAACTGGACAAGAAAAACAATCTTATCTGGCTTTCTTTGGTGTCGCAATACTTGGACTCGTGGGAAGTTTACTTAAAAAGAAACAAATA

SEQ ID NO: 21872 - protein, 800 aa, Streptococcus agalactiae
MSKHYFSKSVFALTVLTATATSGLAVQAEDIVTTPSSTATKVESTTPTSTIAEEKSNVTSTPTAITDASTATSTNTTTNNQNPQPVATEATTSDLKPIEGEKVDLRIMSTTDLHTNLVNYDYYQDKESQKIGLAKTAVLIEEAKKENPNTVLVDNGDVIQGTPLGTYKAIVKPVAENEEHPMYQAMNALGYDASTLGNHEFNYGLDYLKKIIATANLPILNANVLDFKTHQPVFKTYDIITKTFKDSTGRSVALNIGITGIVPPQILNWDKANLEGKVTVKDSVKAIEEIVPTMRAKGADVILVLSHSGIGDDRYEEGEENVGYQIASIKGVDAVVTGHSHAEFPSGNGTGFYEKYTGVDGINGKINGTPVTMAGKYGDHLGIIDLGLSYTNGKWQVSESSAKIRKIDMNSTTADERIIALAKEAHDGTINYVRQQVGTTTAPITSYFALVKDDPSVQIVNNAQRWYVANELKGTPEANLPLLSAAAPFKAGTRGDATAYTDIPAGPVAIKNVADLYLYDNVTALLKVTGADLREWLEMSAGQFNQIDPNNKAPQNIINTEYRTYNFDVIDGLTYKFDITQPNKYNKDGKVVNSQASRVRDLMYNGKPVADKQEFMIVTNNYRASGTFPGAKNATMNRLLNLENRQTIINYIISEKTINPTADNNWGFTESIKGLDLRFQTADKAKNLVTNSKDIQYIASSTKDEGFGDYRFVYTEQEKIDLTEPSHQEKLSQIEKQKIHHMVATAYTKAKASPNIAGTVYTQQKEKTLPKTGQEKQSYLAFFGVAILGLVGSLLKKKQI

SEQ ID NO: 21873 - protein, 453 aa, Streptococcus agalactiae
ATGCCTAAATTAACCCTAGTCTATATCAGTCTTAGCGGCAATACTCAAAGCTTTGTCAAACGTCTTAGTGAACAACTGTCAACTTGGCATAACTGTCAAGTTTCGACTATTAATATCAAGGAACAAAATCATCAAACCTTTCCTGTTGACCAACCTTTCGTAGCACTATTACCCACTTACCTTGAGGGAGGAAATGGCATTGACAATGGCGATCAAGAAATTCTTACCATTCCACTTGGTGATTTTATAGCTGCACACAATAATGTCAAAAATTGTATCGGAATTGTTGGCTCTGGAAATAGAAATTTTAACAATCAGTACTGTTTAACTGCAAAACAATACTCTGAACGGTTTGGATTTCCTATGTTAGGAGACTTTGAATTGCGAGGAACTTCTAGCGACGTTGAACGTATCGCAAATATTATCGTTGAAACATTATCGAACTTAAAAGCC

SEQ ID NO: 21874 - protein, 151 aa, Streptococcus agalactiae
MPKLTLVYISLSGNTQSFVKRLSEQLSTWHNCQVSTINIKEQNHQTFPVDQPFVALLPTYLEGGNGIDNGDQEILTIPLGDFIAAHNNVKNCIGIVGSGNRNFNNQYCLTAKQYSERFGFPMLGDFELRGTSSDVERIANIIVETLSNLKA

SEQ ID NO: 21875 - protein, 894 aa, Streptococcus agalactiae
ATGGTTTCTCTAAAAGGAAAAAATGATACTAAACATCGCATGATAACTGCTCACCTTGATACACTTGGTGCTATGGTTAGGGCCATCAAACCAGATGGTCGGTTAAAAATTGACCTTATTGGCGGATACACATACAATGCCATTGAAGGAGAAAACTGTACTATACACCTCTCAAAAAATGGTAAAGAAATTTCTGGAACTGCTCTTATTCATCAAACTAGTGTCCATGTTTACAAAGATGCTGGAACTGCTGAACGTAATCAAACAAATATGGAAATTCGTTTAGATGAGAAAGTAACAACTGCTGACGAAACACGTGCTTTAGGCATCCAGGTCGGTGATTTCATTTCATTTGATCCGCGTACAATCATAACAGGCAGCGGCTTTATTAAATCACGTTACCTAGATGACAAGGTATCCGCTGGTATCCTAATGGAACTTCTTTCTGTTTACAAGAAAGAAGACATTCAACTTCCTTATACTACTCATTTCTACTTTAGTGCCTTTGAAGAGCTAGGACATGGAGCAAATTCAAGCATCCCAAATGAAACTGTAGAATATCTAGCAGTTGATATGGGAGCTATGGGAGACGATCAAGAAACTGACGAATATACTGTCTCTATCTGTGTTAAAGATGCTTCTGGTCCTTATCATTATGAATTACGTCAACATCTTGTTTCTCTAGCTGAAAACAATAATATTCCTTATAAACTTGATATTTATCCTTATTATGGTAGTGACGCCTCCGCTGCCATGCGTGCTGGTGCGGAAGTTAAACACGCGCTACTTGGTGCAGGTATTGAATCTAGTCATTCTTATGAACGTACCCATATCGATTCTATTCAAGCAACTGAACTCTTAGTGGATGCCTATCTCAAAAGCAATATGGTGAAC

SEQ ID NO: 21876 - protein, 298 aa, Streptococcus agalactiae
MVSLKGKNDTKHRMITAHLDTLGAMVRAIKPDGRLKIDLIGGYTYNAIEGENCTIHLSKNGKEISGTALIHQTSVHVYKDAGTAERNQTNMEIRLDEKVTTADETRALGIQVGDFISFDPRTIITGSGFIKSRYLDDKVSAGILMELLSVYKKEDIQLPYTTHFYFSAFEELGHGANSSIPNETVEYLAVDMGAMGDDQETDEYTVSICVKDASGPYHYELRQHLVSLAENNNIPYKLDIYPYYGSDASAAMRAGAEVKHALLGAGIESSHSYERTHIDSIQATELLVDAYLKSNMVN

SEQ ID NO: 21877 - protein, 495 aa, Streptococcus agalactiae
ATGGTAGCCACGCTCATTATTATCAGGGGAAATTCAGCTAGCGGAAAGTCTACAATAGCTAAACAACTTCAAGCCGAATTAGGGGAAGATACCCTTCTCTTATCTCAGGATTACCTTCGTAGAGAGATGTTAAGAACTAAGGATGGTGAAAATACTACTACCATTCCCCTTTTGATCAATTTACTAAATTATGGTTACCATAACTGTTCCTACATCATCCTTGAAGGCATACTTCGTTCTGATTGGTATACGCCTGTTTGGAAACATATTTTAAAACATAACCCCAACAATACTTATGCTTATTACTATGATTTAAGCTTTCAAGAAACTGTTAAAAGACATTCAACTCGACTTAAATCTTTAGAATTTGGAGAAGATTCTCTTGCAAGATGGTGGCTTGAGAAAGACTTCTTAAAAGAGATACCTGAAAAAATATTAACAAAATCTATGAGTTTAGAGGATGTCAAAAAACTTATAATGACCGACGTTTTACCT

SEQ ID NO: 21878 - protein, 165 aa, Streptococcus agalactiae
MVATLIIIRGNSASGKSTIAKQLQAELGEDTLLLSQDYLRREMLRTKDGENTTTIPLLINLLNYGYHNCSYIILEGILRSDWYTPVWKHILKHNPNNTYAYYYDLSFQETVKRHSTRLKSLEFGEDSLARWWLEKDFLKEIPEKILTKSMSLEDVKKLIMTDVLP

SEQ ID NO: 21879 - protein, 1035 aa, Streptococcus agalactiae
ATGAAAGAAAAACAGTCGAAAAGGCTTATTTATATACTACTGGTTGTTCCCATTATTTTTATAAGTGTTTTTACATACAGTATTAGCCAGCCTTCTAAACTACTTCCACCAAAAGAATTAGTTATTCTAAGTCCAAATAGTCAAGCCATTTTAACAGGAACGATTCCAGCTTTTGAGGAAAAATACGGTATAAAAGTTAAGCTTATTCAAGGTGGGACAGGTCAACTAATAGATAGATTAAGTAAGGAGGGTAAGCAGTTGAAGGCGGATATTTTCTTTGGAGGAAATTATACGCAATTTGAAAGTCATAAGGCATTGTTTGAGTCTTACGTATCAAAGAATATTCATACTGTTATTCCAGATTATATCCATCCGAGTGATACGGCGACACCTTATACTATAAATGGGAGTGTCTTGATTGTAAATAACGAATTAGCTAAGGGACTTACCATCAAGAGTTATGAAGATTTATTACAGCCTTCCTTAAAAGGTAAAATTGCCTTTGCAGATCCGAATACTTCCTCTAGTGCTTTCTCACAACTCACTAATATACTCTTGGCCAAGGGTGGTTACACCAATCCAAAAGCGTGGAACTATGTTAAAAAGCTACAACATAATATTAATGCTATCAAATCTTCTAGCTCTTCAGAAGTTTATCAATCAGTTGCAGAAGGAAAAATGATTGTGGGGTTGACTTACGAAGACCCTAGTGTCAATTTGCAAAAAAGTGGTGCCAATGTTTCTATTGTATATCCGACAGAAGGGACAGTTTTTGTCCCATCTTCGGTTGCAATTATAAAGAATGCTCCTTCTATGAAAGAAGCAAAGTTATTTATTAATTTTATGCTTTCTTTAGATGTTCAAAATGCCTTTGGGCAGTCAACGAGTAACCGACCTATTCGTAAAGATGCCCAAACGAGTAATGGCATGAAAGCTTTAAAGGATATTGCTACTCTTAAAGAAGATTATCGCTATGTCACTAAGCATAAGGGCCAAATCCTTAAAACCTATAATCGTATTCGCAGAAATGCTGAT

SEQ ID NO: 21880 - protein, 345 aa, Streptococcus agalactiae
MKEKQSKRLIYILLVVPIIFISVFTYSISQPSKLLPPKELVILSPNSQAILTGTIPAFEEKYGIKVKLIQGGTGQLIDRLSKEGKQLKADIFFGGNYTQFESHKALFESYVSKNIHTVIPDYIHPSDTATPYTINGSVLIVNNELAKGLTIKSYEDLLQPSLKGKIAFADPNTSSSAFSQLTNILLAKGGYTNPKAWNYVKKLQHNINAIKSSSSSEVYQSVAEGKMIVGLTYEDPSVNLQKSGANVSIVYPTEGTVFVPSSVAIIKNAPSMKEAKLFINFMLSLDVQNAFGQSTSNRPIRKDAQTSNGMKALKDIATLKEDYRYVTKHKGQILKTYNRIRRNAD

SEQ ID NO: 21881 - protein, 770 aa, Streptococcus agalactiae
ATGTATAGATTACTTATCGTTGAGGATGAGCACCTTATTCGTAAGTGGTTACGCTATGCTATTGATTATCAATCATTGAATATTTTAGTGGTTGGTGAAGCAAAAGATGGTAAAGAAGGAGCTCAATTAATTCAGGAAGAGCAGCCAGACATTGTTTTAAGTGATATTAATATGCCAATTATGACAGCATTCGATATGTTTGAGGCAACCAAAGGACAATCTTATGCCAAAATTATTTTATCTGGCTATGCTGATTTTCCAAATGCGCAATCAGCTATTCACTATGGCGTTCTTGAATTTTTAACAAAACCACTAGAAAAGCAAGCTTTGATTGATTGTTTAAAAACAATTATGGCTAGAATTGAGGAACATAAGGAGAAGCACCTACAAGAGCATACAGAATTGTATTTACCTCTACCACAAGCTAATGACCAAGTTCCTGAAGTTATTAAAGATATGCTAGCATGGATTCATAGCCATTTTCATGGGAAAATTGTGATTAGCCAGTTAGCTCACGATTTAGGTTACAGTGAAAGTTATCTTTACACAGTCACTAAAAAGCACCTTCATATAACTTTGAGTGATTATATAAATCAATATCGTATTAATCAAGCCATTCAGTTGATGTTTAGAGAACAGACCTAATGGTTTACCAAATTGCAGAAGCTGTTGGTATTTATGATTATCGTTATTTTGATAGGGTTTTTAAAAAGTACTTGGGTCAGACAGTAAAAGCGTTTAAGGAAGAACATATTTTTAAACAGATGGAT

SEQ ID NO: 21882 - protein, 257 aa, Streptococcus agalactiae; identical to SEQ ID NO: 3510

SEQ ID NO: 21883 - protein, 1644 aa, Streptococcus agalactiae
ATGAGAGGATATAGAATGGAAGAACGCTTTAAGAAACGACTACAAGATGATATCTCTAAACATTTTTCCCGCCAGTCTTTAATTTTATCCTTGTATTGATTGCACTTTTCGTCCTTTTTCTTTAGCGCCTCAACAGATAGGTCTTTATAAAGATGTTAATTCAGTCTCCTATAGTTATAAGCAATTGATTCAAAAACATGATACCTTATTAGATGACTTAGGTAAAAATAGTTTGAAACCATTTGTCTCAGGACACTTAGGAAGTGCTGATTGAGTAAGCAATATTATCATTTAAGGAATCATTTACAAAGTCAAACAGAACTTTTAGTATTCTCACCTAATCAAGAACTTTTGTTTGCTAGTAATTCACATTTAGGTAATTTTTTTAGTAAGTCTATTTACATTAGTGAAGTTTTAGATAAGGCTAAAATAAATCAAAGGCTACTAAAAATTATTGTGGATAGTGAGGGAGGGCATTACCTTGCACTCATTAAGCCAATTATAGTTAATAAAAAAGTTTCAGGTTATGCCTTTTTATTGATGAATGGGAAAGACTTTTTACTTCCAACGAAGGCTATTAACTCAGACTTGATTATTGCCGATCAGCTAAATAATAGCTTTACTTTTACTAATCGTGATTTTATCTCCTCTAGTTTAGATAAGGTAGATAGTCAATTCTTAACTAGATATTTTAGTTTTCACGATCATCGAGCTTTTGTTGTTAGGAAAGTAGCTCTGCAAGATAATATCCTACTTTACATGTATCGTCCCCTGATACCAGTAACTCTGGTCGTCCTTTTTTCTCTAGTATCATCAGTTATTATTTTTGTGATTTTACGACGAAAATCTAGAGTTCTAGCCGATCGCATCGCAGTAAAAAATTCTAGCGCCATAAATCAAATGGTGCTAGATATGGATGCCATTTCCCGCCAAGAAAAATCTAGTATTGAGCTTGATAGTCAAGATGAATTTCAATATCTATCTGTTCAAATCAATCAGATGGTTTCACGGTTAAAAGATTTACATGAGAAAACTCTCGATTTGGAAACACAAAAGTTGCTGTTTGAAAAGAGGATGTTAGAAGCTCAGTTTAATCCTCACTTCCTTTATAATACCCTTGAGACAATTTTAATAACCAGTGACTATGATTCACAATTAACAGAAAGAATCGTTATACAACTAACAAAATTATTGCGCTATAGCCTTAGTGGTAGCACAGAAGCAGCTGTGCTTAAGGATGATTTAGCAATCATTGAATCCTACCTTTTGATTAATCAAGTGAGATTTGAAGAATTAACTTACACTATTTCAGTATCCCCTAAACTTGAACACATGCGTGTACCAAAACTTTTCTTGTTACCGCTAATTGAGAATGCTATTAAATATGGCTTAAAAGAACGTCATGATGTAGCAATAAACATAGATATTTGGCAAGATAGTGATGGAATTTGGTTTACTGTTTCAAATAATGGATCAGGTATTAGTTTGGCTAGGCAAAAAGCCATACGTACAATGTTAAAATCAACTCACTCGCATCATGGGCTTATTAATTCTTATAGACGATTACAATATCAATTTTCAACAGTATTGTTAGAGTTTACGAAGACAGATGATGCTTTTCGAGTTAGCTATATAGTAAAGGAG

SEQ ID NO: 21884 - protein, 549 aa, Streptococcus agalactiae
  VARIANT 32, 92: Xaa = Any Amino Acid
MRGYRMEERFKKRLQDDISKHFSRQSLILSLXLIALFVLFSLAPQQIGLYKDVNSVSYSYKQLIQKHDTLLDDLGKNSLKPFVSGHLGSADXSKQYYHLRNHLQSQTELLVFSPNQELLFASNSHLGNFFSKSIYISEVLDKAKINQRLLKIIVDSEGGHYLALIKPIIVNKKVSGYAFLLMNGKDFLLPTKAINSDLIIADQLNNSFTFTNRDFISSSLDKVDSQFLTRYFSFHDHRAFVVRKVALQDNILLYMYRPLIPVTLVVLFSLVSSVIIFVILRRKSRVLADRIAVKNSSAINQMVLDMDAISRQEKSSIELDSQDEFQYLSVQINQMVSRLKDLHEKTLDLETQKLLFEKRMLEAQFNPHFLYNTLETILITSDYDSQLTERIVIQLTKLLRYSLSGSTEAAVLKDDLAIIESYLLINQVRFEELTYTISVSPKLEHMRVPKLFLLPLIENAIKYGLKERHDVAINIDIWQDSDGIWFTVSNNGSGISLARQKAIRTMLKSTHSHHGLINSYRRLQYQFSTVLLEFTKTDDAFRVSYIVKE

SEQ ID NO: 21885 - protein, 825 aa, Streptococcus agalactiae
ATGAAATCACAGGATAATTTGACTAAAGAAGACCGTAAAATGCTTCGCTCAGTCTTCTGGCGCTCATGGACGATGAATGCCAGTCGTACTGGGGCAACACAGTACCACGCAGTAGGGGTTATTTATACTTTATTACCAGTCATCAATCGTTTTTATAAGACTGATAAGGATAAAGCAGAGGCACTGGTCCGTCATACAACATGGTTTAATGCCACCATGCACATTAATAATTTTATTATGGGTCTTGTTGCATCTATGGAAAAGAAAAACAGTGAAGATCCTGATTTTGATGCTAGTGCTATCACTGCAGTTAAGGCTTCTTTGATGGGACCTATATCTGGAGTTGGTGATTCATTCTTTTGGGGCATTTTAAGGGTTATTGCGGCAGGTATCGGTATCTCCTTAGCAAGTACAGGCTCAGCCATGGGAGCTGTTGTCTTTCTACTCTTGTATAACATTCCAGCTTTTCTGATTCATTATTATAGTCTCTATGGAGGTTACTCTGTAGGTGCAGGGTTTATCAAAAAATTGTATGAATCAGGTGGTATTAAAATTGTTACTAAGACTTCAAGTATGCTTGGTTTAATGATGGTAGGCTCAATGACTGCTTCAAATGTTAAATTCAAGACAATCTTAACGGTAGCAGCTAAAGGAGCTAAGGAAGCAGCTTCCATACAAAGTTACCTTGACCAATTATTTGTTGGCGTAGTGCCACTGTTGGTAACGATATTAGCCTTCTGGCTTCTACGTAAAAAAGTCAATATCAACTGGATCATGTTTGGTATTATGGTGTTAGGTATTGTACTTGGTCTCTTAGGTATTTGC

SEQ ID NO: 21886 - protein, 275 aa, Streptococcus agalactiae; identical to SEQ ID NO: 3514

SEQ ID NO: 21887 - protein, 807 aa, Streptococcus agalactiae
ATGATAATGCCAGCGACGATGGCAGCTTTAGCTGTATTGATTTGTTTTGGGGGAAATTACTTAACAGGTCAAAGTATGATGGAGAGACCACTTGTAGTTGGTCTTGTAACAGGAATGCTACTAGGTGATATTAAGGTTGGTATCCTAATGGGTGCGTCCCTAGAAGCGCTATTTTTGGGAAACGTTAATATTGGGGGTGTTATTGCCGCAGAGCCAGTAACAGCAACAGCGATGGCAACAACTTTTACCATTATTTCAAACATTGATCAAAAAGCAGCAATGACTCTAGCTGTTCCGATTGGAATGTTGGCAGCATTTGTTGTTATGTTTTTGAAAAACGTCTTCATGAATATCTTTGCACCGATGGTGGATAAAGCTGCAGCCGCAAACCATCAAGGTAAACTTGTGATGCTTCACTATGGTACATGGATTATTTACTATCTCATTATCGCTTCTATTTCTTTCATTGGTATTTTAGTAGGTAGTGGGCCTGTTAATAGTTTTGTCCATCATATTCCTCAAAACCTGATGAATGGTTTGAGTGCGGCGGGAGGCCTCCTTCCAGCTGTTGGTTTTGCCATGCTGATGAAATTATTATGGACAAATAAATTAGCTGTTTTTTACTTGCTTGGTTTTGTTTTAACAGCTTATTTAAAATTACCAGCGGTTGCAGTTGCTGCCCTAGGAGCAGTTATTTGCGTCATTAGTTCACAACGTGATATAGAATTAGACGCAATTACTAGAGGTGCGATCAGTAAACAGACAACCTTTGACTCTAAAGAATCAGAAGAGGAGGACTTCTTCGCA

SEQ ID NO: 21888 - protein, 269 aa, Streptococcus agalactiae; identical to SEQ ID NO: 3516

SEQ ID NO: 21889 - protein, 489 aa, Streptococcus agalactiae
ATGATTACTCAAATTCGTGTTGACGACCGTTTGATTCACGGGCAAGTGGCAGTTGTATGGACTAAAGAATTAAATGCACCACTTTTAGTGGTGGCTAATGATGAAGCTGCAAAAAATGAAATCACACAGATGACTCTTAAAATGGCTGTGCCTAATGGCATGAAATTATTAATCCGTTCAGTTGAAGAATCAATAGCTCTATTTAAAGATCCACGTGCAACTGACAAGCGCATTTTTGTGATTGTCAATTCTGTTAAAGATGCCTGTACAATTGCTAAAAATATAACCGATTTAGAAGCAGTAAACGTCGCTAATGTAGGACGCTTTGATAAGTCTGATCCAGCTACAAAAGTCAAACTAACATCAAGTCTCTTATTAAATCCAGAAGAGTTGGAAGCCGCAAAAGAATTAGCCAGCTTACCAGATTTAGACGTCTTTAACCAAGTATTGCCTTCAAATACTAAGGTTAACTTGAGTCAGTTAGTCAAA

SEQ ID NO: 21890 - protein, 163 aa, Streptococcus agalactiae; identical to SEQ ID NO: 12470

SEQ ID NO: 21891 - protein, 423 aa, Streptococcus agalactiae; identical to SEQ ID NO: 8203

SEQ ID NO: 21892 - protein, 141 aa, Streptococcus agalactiae; identical to SEQ ID NO: 3520

SEQ ID NO: 21893 - protein, 1005 aa, Streptococcus agalactiae
ATGATTAGTTTGCTACAATACCTTTTTTCCATACTGGTCATTTTAGTTCATAGTGGGAGGTTATTTAGTCAGGATGTCATTCATTTTACCTTTAAAAGTTTCCTAGGTCGGATGGCTGTTCCTTATTTTTTGATTTGTACTGCTTTCTTTTTGAGAGGTCGTATACAGCAAGGTTTGTGTAATCACTCCTACTTTCGTAAACTGATTAAAAAGTATAGCATGTGGACTATCATTTATTTGCCTTATGGTTATTTCTTTTTTGAATCTCTAAATATAGCGAAGATCTATTTGTTGCCGGGGTTTATTGTGGCATTTTTGTATTTAGGTATGTCACATACCCTTTGGTACATCCCTGCTGTTATTCTAGGTTGGGTCATTATTCAAGGATTATTGAAGTATGTAGGAACTAGGGGGACATTTATCACAGTTGTTGTACTCTATTGTATTGGAGCAGTAGAGACCTATTCTGTCTTTATACAGTCAACAAAATTTTATCCCCTGATGTCCACTTATATGTCAATTTTTCAGACAACACGAAACGGATTATTTTACACTCCAGTTTATCTTCTAGCAGGATATTTACTCTATGATTATTTTAATACTGACCTATTTACCAAATCGCGTGGTCTTAAGTATATTCTCTTCCTTTTACTTCTAGCTTTAGAGAATGTTCTTATTTATTTTAATCAAGGGTTGGATAAAAATTTCTTCTTATTAGCTCCTTTATGTGCAGTATTCTTATTTAACTGGAGTATACGTACATCACTGTTTAAGGAATATCGTTTAAGTCCTTTAAAACAGTTGAGTGTTTATTATTTCTTCCTTCACCCTCTTTTTATTGGCATAGTGTCTTACTGTTTAAAATCAACTTCCTTAGTTGCACACCATCAAGGAAAAGTGATTTTTGTGGTGACCTTGGCATTAACACATGCTTGTGCTCTACTCATAATAAAGGTTGTTAATAAGATACCCTATCAAAAAATTATTCCATTATCTCTTTCGAAA

SEQ ID NO: 21894 - protein, 335 aa, Streptococcus agalactiae
MISLLQYLFSILVILVHSGRLFSQDVIHFTFKSFLGRMAVPYFLICTAFFLRGRIQQGLCNHSYFRKLIKKYSMWTIIYLPYGYFFFESLNIAKIYLLPGFIVAFLYLGMSHTLWYIPAVILGWVIIQGLLKYVGTRGTFITVVVLYCIGAVETYSVFIQSTKFYPLMSTYMSIFQTTRNGLFYTPVYLLAGYLLYDYFNTDLFTKSRGLKYILFLLLLALENVLIYFNQGLDKNFFLLAPLCAVFLFNWSIRTSLFKEYRLSPLKQLSVYYFFLHPLFIGIVSYCLKSTSLVAHHQGKVIFVVTLALTHACALLIIKVVNKIPYQKIIPLSLSK

SEQ ID NO: 21895 - protein, 180 aa, Streptococcus agalactiae; identical to SEQ ID NO: 8207

SEQ ID NO: 21896 - protein, 60 aa, Streptococcus agalactiae; identical to SEQ ID NO: 8208

SEQ ID NO: 21897 - protein, 855 aa, Streptococcus agalactiae
GTGGCAGACACTTTTGATCGTGATTTTTTAATTTACTATAACCAATTGAAAGATGATAAAACAATTGATTTTAATAAAATAAATATTAAAGATCAAAAACAGTTGGGTTCTGCGCTACCACTAAAACAACTAAAGCTAGGTAACTTTGCTCCTTGGAATCAACTTTTTGAAGTAAGTAATAGTACTTATATTTTAATTGTCTTATTTACTCTATTCTTATCAGCTCCTCTTTTTTCAGGAGATAGGGCTAAGAAGATTAATCCTATACTACTGACGACTCGGTATGGACGTGGTCAGTTGACCTGGGCTAAGTTAGCTAGTACAATGACCATCGGTATTTCCACATTTATCCTAGCATATGCCCTCATTCTGACGGTATTTGCAGATTATTTTGGTTTTAGTGGTTGGGAGACAAGCGTTCAACTGAATTTATACTGGACATCACCTTTGGCTAATATTATGGGATTTCCTGTACCTATGACAATATCAACTGCTTTTGTTCATATTATTGTCTTACAATTTGTTGGACTCCTTTTTATAGCCAGTCTTAATTTCTTTATATCAAGTATCACAAATTCGCCATTAACATCTTTTGCTGTTTCAACGCTTGCCTTTTTTGCTCCTAGCTTTTTAATGGCTATGTTTAATAAAGGTGTGATAAACAAGTTATTAACTATTTTCTCAGTATCAACGACAGACACTTCAGCTTTACTTTTAAAATTATCACGTAATGGTAGTCATGGCTTTTTCTTTGATAGTTTTTCTGCTAATGAAATCTGTCTGATTAGTCTACGTATGTTAATTGCAGTGTTATTGATAGCTTATACCTATCGTTTAATGCGACGAAGAAGTTTA

SEQ ID NO: 21898 - protein, 285 aa, Streptococcus agalactiae
MADTFDRDFLIYYNQLKDDKTIDFNKINIKDQKQLGSALPLKQLKLGNFAPWNQLFEVSNSTYILIVLFTLFLSAPLFSGDRAKKINPILLTTRYGRGQLTWAKLASTMTIGISTFILAYALILTVFADYFGFSGWETSVQLNLYWTSPLANIMGFPVPMTISTAFVHIIVLQFVGLLFIASLNFFISSITNSPLTSFAVSTLAFFAPSFLMAMFNKGVINKLLTIFSVSTTDTSALLLKLSRNGSHGFFFDSFSANEICLISLRMLIAVLLIAYTYRLMRRRSL

SEQ ID NO: 21899 - protein, 276 aa, Streptococcus agalactiae
ATGATATCAATTTTTCCTTTTGAATTAAAAAAACTGCTACAACGTAAGGCAGCATTGGGTACTTTTATTATCTTCCTTCTCGCTATTTTTGGTCTATTTTACCAGCATTTTTTTGTTGGGCAAATTAGTGGCTATTCTGCAGATAAAATACATGGTCGAGAAGCGGTTGCCATTAATCGTAGAATAGCTGAAAAATATTCAGGGGACTTATCTGAAGAACGAGTAACAAATATTATTAAAAACTATGTTAATCCGCCAGCAGGACCCCCCTATATT

SEQ ID NO: 21900 - protein, 92 aa, Streptococcus agalactiae
MISIFPFELKKLLQRKAALGTFIIFLLAIFGLFYQHFFVGQISGYSADKIHGREAVAINRRIAEKYSGDLSEERVTNIIKNYVNPPAGPPYI

SEQ ID NO: 21901 - protein, 708 aa, Streptococcus agalactiae
ATGAGCCACTTTACATTCGCAGATAGTGGGAATATTTATTGGAATGGCCAGGAGCAGTCGGAAGAATTTTATCGTCATATTGGTTTTTTACCGCAACATTTTCGCTATTATGATCAATTTACTGGCATTGCTTTCTTAAATTATATCGCTACTTTAAAAGGTGTTGATAAAAAGAAAGCTAAACAAGAAATTCCTAGATTACTAGAGCTTGTTGGTTTAGGCGATGTAGGTAAAAAGAAGATTTCATCATATTCCGGTGGTATGAAGCAACGTTTAGGCATTGCTCAAGCACTTATCAATGACCCTGAAATAATCATTCTGGATGAACCAACTGTTGGACTTGATCCTAAGGAACGGGTTAAATTTCGCCATATTTTGAGTCAGTTATCCACCAATAAAATTATCATTTTATCAACGCATATTGTGTCGGATGTGGAAGCTGTTGCCAAAGAAATTATAGTATTAAAAAATGGTAAATTTATCGAACATGGCAACACTCCACAGTTGTTGAAAACTATTGAGGGAAAAGTGTGGGAAATAACGACTGAACCAGATTTATCTCAGATACCCAATATTGCTATTGTTAATGAAAAAGTCATTTCAGATAGTCGGGTATTTCGTGTAGTGAGTGATATTTGTCCGAGTGATTCGGCACAGTTGGTTGTTCCGACTCTAGAAGATTTCTACATCTATCATTTTAGAGGGGAG

SEQ ID NO: 21902 - protein, 236 aa, Streptococcus agalactiae
MSHFTFADSGNIYWNGQEQSEEFYRHIGFLPQHFRYYDQFTGIAFLNYIATLKGVDKKKAKQEIPRLLELVGLGDVGKKKISSYSGGMKQRLGIAQALINDPEIIILDEPTVGLDPKERVKFRHILSQLSTNKIIILSTHIVSDVEAVAKEIIVLKNGKFIEHGNTPQLLKTIEGKVWEITTEPDLSQIPNIAIVNEKVISDSRVFRVVSDICPSDSAQLVVPTLEDFYIYHFRGE

SEQ ID NO: 21903 - protein, 180 aa, Streptococcus agalactiae; identical to SEQ ID NO: 12481

SEQ ID NO: 21904 - protein, 60 aa, Streptococcus agalactiae; identical to SEQ ID NO: 12482

SEQ ID NO: 21905 - protein, 1332 aa, Streptococcus agalactiae
ATGAATTCTACTCTATCCATCTTAGAGATAGCTTTAACGATAATATTAACAATATTTCTCTTTTCTAAAATCAGTGGACGTCAATTAACTTTAATAGAGATTGGAATTTGTATTGCTCTGAGATTAGGACTTGTAATTTTATTTATAGCAGCTAATACTATTATTAATCTTTCATTTCTAAAGTACTGGCTTCTCCCCATCTATATGTTAAGTCTGGCTTTCTTGTTGCTAAGACCTATATCTAAAACTTTAGTAGTCTTTTATGGCTTGTTTCCAATTGTTCTCAGAAATCTTTGTTCACGTTCTTTAGCTTTTTTTGTCTTTCCTTTGTTTAATATTGATTTTCATACAACCAACCAGGGGTTTTGGGGATATTTTGTTGATGTCTTGTCTACTCTTTGTGTTCTCTTATTTTTAAGATGGATGCAATACGATTTTAAAGCATTGCGAAGTAGTGAAGTTTCGCCAACAGATAGGAGAATTCTCCAATTTACGAATGGGTGCATGGTGAGTTATTACTTATTGATGCAGTTTTTAACTTACTTCGAATATGAATTAGCCATCAATACTGTTATTTACCGACAATTTTTGCTTGTTGCTTATTGGATTATATTTACGGGAGCAATAGCCAGTTTAGACCGGAGACTTCGAAATTCTTTACAGGAGAGGTTAGCTGTTCAAAGAGAACTCCAATTGGCTAATATGATAGATTATAGCCACCATATTGAGGGATTGTATAAAGAAGTTAGGAGCTTCCGACATGATTATAGTAACATGTTAACGACCTTGAAACTAGGGATTGATAATGAAGATATATCTATTGTCAAATCAGTTTATCAGTCTATCTTTAAAGAATCTAATACACATTTCCGACATCCTAAGTATAATATAGACCGGTTGGTTAATGTAGATAACCCAGCCTTAAAAAGTCTTTTAGCAGCCAAGCTTTCACAAGCGATAGCCAATCATATTATGGTATCTATAGAAGTACCAGACAGTATTAAACCTCAAGGGATGGAACTGATTGATTTTATTACCATTGTATCTGTTTTATGGGATAACGCTATTGAGGCATCTTTAGAGACAGACGATCCTAAGATAGCCATGTCTTATTTTACATTAAAACATAAACAAATTTTTATCATAGAAAATTCAACTAAGGAAAAGGCAATAGATACGTCAACGATATTCAATTATGAGATAAGTAGTAAGGGGCGGAATAGAGGAATAGGTCTTTACAATGTCAGGGGAGTTATCAATCGTTATCCAAATATTTCTATTGCAACAAGTAGCCAAGATTTTAGTTTCTGCCAAACTTTCGAAATCATATTA

SEQ ID NO: 21906 - protein, 444 aa, Streptococcus agalactiae
MNSTLSILEIALTIILTIFLFSKISGRQLTLIEIGICIALRLGLVILFIAANTIINLSFLKYWLLPIYMLSLAFLLLRPISKTLVVFYGLFPIVLRNLCSRSLAFFVFPLFNIDFHTTNQGFWGYFVDVLSTLCVLLFLRWMQYDFKALRSSEVSPTDRRILQFTNGCMVSYYLLMQFLTYFEYELAINTVIYRQFLLVAYWIIFTGAIASLDRRLRNSLQERLAVQRELQLANMIDYSHHIEGLYKEVRSFRHDYSNMLTTLKLGIDNEDISIVKSVYQSIFKESNTHFRHPKYNIDRLVNVDNPALKSLLAAKLSQAIANHIMVSIEVPDSIKPQGMELIDFITIVSVLWDNAIEASLETDDPKIAMSYFTLKHKQIFIIENSTKEKAIDTSTIFNYEISSKGRNRGIGLYNVRGVINRYPNISIATSSQDFSFCQTFEIIL

SEQ ID NO: 21907 - protein, 216 aa, Streptococcus agalactiae
ATGGAATTCACAGCCACTTTGGGGGATATTTTAAAACAAGAACCTAGGCTCTTTCAATGTCATCGCTCTTTTTTAGTAAATCCCTTGAATATTTTTAAAGTGGATAGGTCAAATAAACTAATCTATTTAAAAAATGGTTCGAATTGTTTGATTTCTCGTAATAAAATAAAAGATATTATGGTAGTAATAGAGGAAAATCAAAGAGGTAGAGGAATA

SEQ ID NO: 21908 - protein, 72 aa, Streptococcus agalactiae
MEFTATLGDILKQEPRLFQCHRSFLVNPLNIFKVDRSNKLIYLKNGSNCLISRNKIKDIMVVIEENQRGRGI

SEQ ID NO: 21909 - protein, 342 aa, Streptococcus agalactiae
GTGAATATTTTTATTTTAGAGGATAATTTTATTCAACAGGCACGTTTAGAGAGAATAATTGAGGAAGTTAAAATTAGGAGAAGTATACACAGTAAAATGGTAAATACCTTTGAAAAACCAGTTCAATTATTGGAATCAATCTGTGAAAAAGGTATGCATAATTTATATTTCTTAGACATTGAAATAAAAAATGATGAGCAGAGGGGCTTAGAGGTCGCAAAACAAATTAGACAAATTGATCCTTATGCTCAGATTGTTTTTGTTACAACTCATTCGGAATTAATGCCTTTAACCTTTCGTTATCAGGTATCAGCTTTAGACTATATCGATAAAGGACTTTCA

SEQ ID NO: 21910 - protein, 114 aa, Streptococcus agalactiae
MNIFILEDNFIQQARLERIIEEVKIRRSIHSKMVNTFEKPVQLLESICEKGMHNLYFLDIEIKNDEQRGLEVAKQIRQIDPYAQIVFVTTHSELMPLTFRYQVSALDYIDKGLS

SEQ ID NO: 21911 - protein, 828 aa, Streptococcus agalactiae
ATGAAAGGATACTCTATGGCAAAATGCTTAACGTTAAATACTCATTCATGGATGGAAGTAAATGCTCTAAAGAAATTATTTGATTTAGCAGAGCATATCTTCCGTGAAAAATATGATATCATCTGCCTACAAGAGGTGAACCAGAGCATATCTTCCCCTCTTGCTAAGAGTAGTCCAAATTATCATCCGATTGAAGGTACACCAGCTCTTCATCAAGATAACTTTGCCTTGCAATTAGTGCATTACCTAAATCTTCAAGGTCTACACTATCATTGGACATGGGCTTATAATCATATTGGTTATAGCAAGTACCATGAAGGGGTAGCGATACTTTCTCTGAAACCATTAAAGCCAAATGATATTTTAGTTTCAGCTGTAGACGATGAGACTGATTATCATACTCGTCGTGCTCTGGTAGCTGAGACCACTCTGAATGACAAAGTCGTTACAGTAGTTAGCCTCCATTTATCATGGTTTGAGAAAGGATTTGCGGAGGAGTGGAAACGACTAGAAACTACCCTACTTGAGGTAGAAACTCCACTTTTACTCATGGGTGACTTTAATAATCCTACTGGAAATCAGGGTTATGAACTTGTTCTTAATAGTCCATTAGCATTAAAGGATAGCCACCAAATAGCCAATCATGTATTTGGGGACCATACTATTATGGCTGATATTGATGGTTGGGAAGGGAATAAAAAGGCTCTTAAAGTTGACCATATTTTTACTAGCGAAGACCTTTCAATCAGTTCAAGTCAAGTAGTTTTTGAAGGTGGTGAAGCACCTGTCGTTAGTGATCATTACGGCTTGGAAATTACGTTAAATCTT

SEQ ID NO: 21912 - protein, 276 aa, Streptococcus agalactiae
MKGYSMAKCLTLNTHSWMEVNALKKLFDLAEHIFREKYDIICLQEVNQSISSPLAKSSPNYHPIEGTPALHQDNFALQLVHYLNLQGLHYHWTWAYNHIGYSKYHEGVAILSLKPLKPNDILVSAVDDETDYHTRRALVAETTLNDKVVTVVSLHLSWFEKGFAEEWKRLETTLLEVETPLLLMGDFNNPTGNQGYELVLNSPLALKDSHQIANHVFGDHTIMADIDGWEGNKKALKVDHIFTSEDLSISSSQVVFEGGEAPVVSDHYGLEITLNL

SEQ ID NO: 21913 - protein, 2181 aa, Streptococcus agalactiae
ATGAAAAATAATGTCAAACAGCTCTTTAGTTTTGAATTTTGGCAGAAGTTTGGGAAGGCTTTGATGGTTGTTATTGCTGTTATGCCAGCAGCAGGATTGATGGTTAGTATTGGTAACTCCATTAGTCTATTGGATCCATCAAATGTTTTATTAGGGCGCATAGCTAATGTTATTGCTCAAATTGGTTGGGGAGTTATTGGTAACTTACACATCTTATTTGCATTGGCTATTGGTGGTAGCTGGGCTAAAGAACGTGCCGGTGGTGCTTTTGCGGCTGGCTTATCCTTTATTCTTATTAACCTTATTACAGGGAACTTTTTTGGTGTTAAAACAGATATGTTAGCAGACAGTAAAGCAACTGTTCAAACGGTATTTGGTGCAACCATCAGAGTTTCAGATTACTTTGTTAACGTTCTTGGGCAACCTGCTCTTAATATGGGTGTATTTGTCGGTATTATTTCAGGTTTCGTTGGTGCAACTGCCTTTAATAAATATTATAACTATCGTAAATTACCAGATGCTTTAACTTTTTTCAATGGAAAACGTTTTGTTCCATTTGTTGTTATTTATCGTTCAGTCATTGTTGCATTAATTTTATCAGTATTTTGGCCGGTTGTTCAATCAGGTATCAATGGCTTTGGTAAATGGATTGCAAGTTCACAAGACAGTGCTCCAATATTAGCACCATTTGTCTACGGTACGTTAGAGCGTTTATTGCTCCCATTTGGTTTACACCATATGTTAACTATTCCAATGAACTACACGCAACTAGGTGGTACATACACTGTCCTTACAGGTGCAACTAAAGGAGCACAGGTGTTGGGACAAGATCCACTGTGGTTAGCATGGGTTGGTGATTTAATTAACTTAAAAGGCTCAAATTCAAGTCAATACCATCACTTATTGACAAGTGTCACTCCAGCACGTTTTAAAGTGGGGCAAATGATTGGTGCTTCAGGTATTTTGATGGGATTATCTTATGCTATGTATCGTAACGTTGATAAAGATAAAAAATTGAAATACAAGTCAATGTTTATTTCAGCAGCAGCGGCTACTTTCTTGACAGGTGTTACTGAGCCAATTGAGTACATGTTCATGTTTGCAGCAATGCCACTCTACCTTGTATATGCTGTCGTTCAAGGATGTGCGTTTGCTATGGCAGATATTGTTAACCTCCGCGTTCATTCATTTGGTAATATAGAATTTTTAACACGTGTTCCTATGGGCATAAAAGCGGGCCTTGGTGGTGATATTTTCAACTTTGTTTGGGTGACACTTCTTTTTGCAGTATTGATGTACTTTATTGCAAACTTTATGATTAAAAAATTCAATTTAGCAACAGCAGGACGTAATGGTAATTATGATAACGAAGAGGTTGATAATGCTCCTTCAACAGCTTCTGGTTCTGCTGATGCAAATTCTCAAGTTGTACAAGTTATTAATTTACTTGGTGGTCGTGATAACATTGAAGATGTAGATGCATGTATGACTCGTCTTCGTGTCACAGTTAAAGATGGAAATAGCGTGGGTTCTGAAGCAGCTTGGAAAAAAGCTGGCGCAATGGGATTGGTATTAAAAGGTAATGGTGTTCAAGCTATTTACGGACCTAAAGCAGATGTCCTTAAATCAGACATTCAAGATTTGCTAGATTCAGGTACAGTTATTCCAATAGTTGATTTAGAAACAGGCCAACCTGTAGCAGCAGCCCAAGTTACAACTTATAAAGGAATAACAGAAGAAATTGTTTCGGTGGCTAATGGTCAAGTAGAAGCATTGGATGTTGTTAAAGACCCTGTCTTTTCTCAAAAAATGATGGGTGATGGTTTTGCTGTGGAACCAACTGATGGCAATATCTATGTTCCAGTTTCAGGTACAGTTACTAGTGTCTTTCCAACAAAACATGCTTTTGGTTTATTAACAGAAAGTGGCCTAGAAGTTTTAGTACATATCGGTCTAGATACAGTAGCTCTTGATGGTCAACCATTTGAGGTTAAAATTTCTAGTGGTCAAAAAGTGGTAGCAGGTGATCTTGCTGTGGTAGCAGATTTGGAAGCTATCAAAGCAGCTGGTAAAGAGACAAGTGTGATTATCGTCTTTACAAATGTTTCAGATATAAAAACTGTTAAACTTGAAAAATCAGGTCCACAAATAGCTAAAACAGTTGTGGCAAAAGTCGAACTG

SEQ ID NO: 21914 - protein, 727 aa, Streptococcus agalactiae
MKNNVKQLFSFEFWQKFGKALMVVIAVMPAAGLMVSIGNSISLLDPSNVLLGRIANVIAQIGWGVIGNLHILFALAIGGSWAKERAGGAFAAGLSFILINLITGNFFGVKTDMLADSKATVQTVFGATIRVSDYFVNVLGQPALNMGVFVGIISGFVGATAFNKYYNYRKLPDALTFFNGKRFVPFVVIYRSVIVALILSVFWPVVQSGINGFGKWIASSQDSAPILAPFVYGTLERLLLPFGLHHMLTIPMNYTQLGGTYTVLTGATKGAQVLGQDPLWLAWVGDLINLKGSNSSQYHHLLTSVTPARFKVGQMIGASGILMGLSYAMYRNVDKDKKLKYKSMFISAAAATFLTGVTEPIEYMFMFAAMPLYLVYAVVQGCAFAMADIVNLRVHSFGNIEFLTRVPMGIKAGLGGDIFNFVWVTLLFAVLMYFIANFMIKKFNLATAGRNGNYDNEEVDNAPSTASGSADANSQVVQVINLLGGRDNIEDVDACMTRLRVTVKDGNSVGSEAAWKKAGAMGLVLKGNGVQAIYGPKADVLKSDIQDLLDSGTVIPIVDLETGQPVAAAQVTTYKGITEEIVSVANGQVEALDVVKDPVFSQKMMGDGFAVEPTDGNIYVPVSGTVTSVFPTKHAFGLLTESGLEVLVHIGLDTVALDGQPFEVKISSGQKVVAGDLAVVADLEAIKAAGKETSVIIVFTNVSDIKTVKLEKSGPQIAKTVVAKVEL

SEQ ID NO: 21915 - protein, 1653 aa, Streptococcus agalactiae
ATGACTAAAAAAATTTTCCGTACAACTTTATCCGCTAGTTTGGGAATTGTTTTAGTTACAATTTTGATGATTATGGGATTTCTCTATAATTACTTCAATCACATTCAGCGAGAACAGTTGAGAACACAAACGGCACTGGCGTCACAAGGAATTTCCTTTGAAGGTAAAGATTATTTTGAAAATCTTAAAACTTCAAATGTGCGTATTACTTGGGTAGATAATAAGGGACAAGTGCTTTATGATACCCAATCAGATGCAAAACATATGAAAAATCACGCCAATCGTCAAGAAATTAAAGAAGCTATCAAGAGTGGTTACGGTGAGAGCACGAGGTGGTCAGCGACACTTACTGAGAAGTCTATCTATGCTGCGCAACGTTTAAATAATGGAACGATAGTTCGTTTATCAGTTGCGCAACAAACTATTTTTTATCTTCTCCTTGGTATGATGAGTCCCTTAGCAATTATCATCTTACTTGCTATTATTTTATCTGTATTAATTGCACGATATATAGCGAAAAAAGTATCAGAGCCTTTAAACAATATTGACTTAGATCATCCTTTATCAAATGATAGTTACGAGGAGATAACACCATTATTAAGGCGTCTTGATAGCCATCAGGCTAAGATTCAACATCAAAAACTGTTATTACAAAAGCGTCAAAAAGAATTTGATACCATTATTTCTAAAATTAAGGAAGGAATGATTCTTTTAGATGATCAAGCAAGAATCGTTAGTATCAACGCAGAAGCTTTAAAGTTATTCCAAATTAATGATGATTGGCATGGGCGCTTTATGATGGAAGTTAGCCGAGATTTAACTCTCAAAGACTTAATCGATCAAGGACTAAAAGGGAAAAAGAAAGAGGCTAATATTGGCATTGAAAATAATCATTACCGCGTCTTGGTAAGACCAACTACAGATAACAACCGAGTAACAGGATTGGTTGTTCTACTGTTTGATGTGACTGATCAACTCCAAATGGAACAACTTCAACGTGAATTTACTGCCAATGTCTCTCATGAATTGAAAACCCCGCTTCATGTTATTTCTGGTTACTCAGAACTGTTAGCTAATCAAATGGTTCCAAACGAAGAAGTCCCACAATTTGCAGCTAAAATTCATAAAGAATCTGAACGATTAGTTAAATTGGTTGAGGATATTATCAACCTTTCTCACCTTGATGAACAAGAAAAATTACCGCAAGAGACAGTAAATCTGTATGACTTAACACAAAAAGTTTTAGAAGGTTTACAAGCTAAAGCAGATAAGAAGCACATACAAATCAATTTTAATGGAGAAGAAGCTATTTTGCGAGGGAATCCAGTTTTATTGAATTCCTTGGTGTACAACTTGTGTGACAATGCTATCACCTATAACCATGAGAAAGGTCAAGTAAATGTGACTTTGAAAAATTCACCTGATACAATTACCTTAGAAGTTAGTGATACGGGACTAGGCATTGCAGAGAAGGACAAAAAACGTATTTTCGAACGTTTCTATCGCGTCGATAAAAGTCGCTCAAAAATAGTTGGGGGGACTGGTTTAGGTTTGTCTATTGTAAAGAGTGCTTTAGATTTTCACAATGGTAGTATAAAAGTGGACAGCCATTTGGGGCAGGGAACAACAATGACCGTTTTACTTCACAAACAA

SEQ ID NO: 21916 - protein, 551 aa, Streptococcus agalactiae
MTKKIFRTTLSASLGIVLVTILMIMGFLYNYFNHIQREQLRTQTALASQGISFEGKDYFENLKTSNVRITWVDNKGQVLYDTQSDAKHMKNHANRQEIKEAIKSGYGESTRWSATLTEKSIYAAQRLNNGTIVRLSVAQQTIFYLLLGMMSPLAIIILLAIILSVLIARYIAKKVSEPLNNIDLDHPLSNDSYEEITPLLRRLDSHQAKIQHQKLLLQKRQKEFDTIISKIKEGMILLDDQARIVSINAEALKLFQINDDWHGRFMMEVSRDLTLKDLIDQGLKGKKKEANIGIENNHYRVLVRPTTDNNRVTGLVVLLFDVTDQLQMEQLQREFTANVSHELKTPLHVISGYSELLANQMVPNEEVPQFAAKIHKESERLVKLVEDIINLSHLDEQEKLPQETVNLYDLTQKVLEGLQAKADKKHIQINFNGEEAILRGNPVLLNSLVYNLCDNAITYNHEKGQVNVTLKNSPDTITLEVSDTGLGIAEKDKKRIFERFYRVDKSRSKIVGGTGLGLSIVKSALDFHNGSIKVDSHLGQGTTMTVLLHKQ

SEQ ID NO: 21917 - protein, 675 aa, Streptococcus agalactiae
ATGATATATTGTGTTGAAGATGATGCTGATATTCGCGAAATGATGCTCTATACTTTGCAAATGGCAGGTTTTAAAGCTCAAGGATTCTCGAGTTCAGAGCTTTTTTGGGAAGCTATTCAGGAGAAAGTTCCAGACTTGATTTTACTTGATATTATGTTGCCGGGAGATGATGGTTTGACTATTTTAGAGCGTTTAAGGAGAAAACATCAAACGGAAATGATACCAGTAATCATGACAACTGCTAAAGGTAGTGAGTATGATAAAGTTAAAGGGTTAGATCTTGGAGCAGATGATTATCTCGTCAAACCTTTTGGGATGATGGAAATGATTTCACGAATAAAAGCAGTCTTGAGACGTAGCCGCCAAGTAGATTCAAAAGCTCATATTATCATTGGAAATTTAGAGATTGATCCGACTAATTATTGGGTCAAAAGGGGAACGGAAAAAATCCACTTAACCCTAAAGGAATTTGAGTTATTAGTATTATTCTTCCGTAATCCCAATAGAGTCTTTACAAGGCAAGAACTTCTGGATAAGGTTTGGGGAGAACAATTTTTAGGAGAAACTAGAACTGTGGATGTTCACATTGGGACACTGCGAACAAAACTTGGTGAGGATGGCTATTTGATCGCTACAGTAAGGGGAGTTGGATACCGTTTGGAGGAAAGACATGAC

SEQ ID NO: 21918 - protein, 225 aa, Streptococcus agalactiae; identical to SEQ ID NO: 3538

SEQ ID NO: 21919 - protein, 654 aa, Streptococcus agalactiae
ATGATTCGTTCACGATTTGCAAGTCAACTTAATGACCTTAATAAAGAAATTATTTTTATGGGGGCATTGTGTGAGGACATCATTGGGAAGTCCTTAGGTGCTCTAACAAATAGTAATGACGTTTACCTTGACGATATTTCTGAAACTTATCACAAGATTGAACAAATGGAACGGGATATTGAGGAGAGATGTTTAAAACTTTTACTTCGTCAGCAACCAGTTGCCAAGGATTTACGCCGTATTTCTTCTGCATTAAAAATGGTTTATGATATGAAACGTATTGGTGCTCAAGCTTATGAAATTGCGGAAATTGTTAGCTTAGGTCATATTATCCAAGGTGCAGGTTCTGAAAGGGATCAACTTAACAGCATGTCTAATAATGTCATTAGTATGCTGACTAAGAGTATAGATGCTTTTATTTATGACAATGAAGAACAAGCGCATCAAGTAATTGAACAAGATAGGACAGTTAACCAGGAATTTGATACAATAAAGAAACAGTTAGTGTTATATTTTTCGGTACAGGATGTTGATGGTGAATATCCCATAGATGTTTTAATGATCGCCAAGTACCTAGAGCGTATTGGTGATCATACAGTAAATATTGCTAAATGGGTGCTTTTCTCAATAACAGGTAACCTAGATGGAGAAGCG

SEQ ID NO: 21920 - protein, 218 aa, Streptococcus agalactiae; identical to SEQ ID NO: 3540

SEQ ID NO: 21921 - protein, 747 aa, Streptococcus agalactiae
GTGAGTAAATTAGTAATTAATAATTTAGATTTGTATTATGGAGAATTTCACGCTCTGAAGGATGTTAATTTAGACATTGAAGAAAAAGAAATCACAGCCTTTATTGGACCTTCTGGGTGCGGAAAGTCTACTCTCTTGAAAAGTATTAACCGTATGAATGATTTGGTCAAAAATTGCAAAATCACAGGGGATATTACTTTAGAAGGCGAGGATGTCTATAGACAATTGGATATTAACCAATTGCGTAAAAAGGTTGGAATGGTATTTCAAAAACCTAATCCGTTTCCAATGAGCATTTATGATAATGTTGCTTTTGGTCCAAGAACGCACGGTATTCATTCCAAAGCAGAGTTAGATGATATCGTTGAACGTTCCCTTAAACAGGCGGCTCTATGGGATGAGGTTAAAGATCGTCTTCACAAATCTGCTCTGGGTATGTCTGGCGGACAGCAGCAACGTTTGTGTATTGCGCGTGCTCTTGCTATTGAGCCTGATGTTTTACTTATGGATGAACCCACAAGTGCCTTGGATCCTATTTCAACAGCAAAAATTGAAGAATTGGTTATCCAACTGAAGAAGAACTACACTATTGTTATAGTGACACATAATATGCAACAAGCTGTTCGTATTTCTGATAAAACAGCATTCTTTCTGATGGGAGAAGTGGTTGAATATAACAAAACGTGCCAACTCTTTTCATTGCCACAAGATGAGCGTACAGAAAACTACATTACAGGGAGATTCGGA

SEQ ID NO: 21922 - protein, 249 aa, Streptococcus agalactiae
MSKLVINNLDLYYGEFHALKDVNLDIEEKEITAFIGPSGCGKSTLLKSINRMNDLVKNCKITGDITLEGEDVYRQLDINQLRKKVGMVFQKPNPFPMSIYDNVAFGPRTHGIHSKAELDDIVERSLKQAALWDEVKDRLHKSALGMSGGQQQRLCIARALAIEPDVLLMDEPTSALDPISTAKIEELVIQLKKNYTIVIVTHNMQQAVRISDKTAFFLMGEVVEYNKTCQLFSLPQDERTENYITGRFG

SEQ ID NO: 21923 - protein, 876 aa, Streptococcus agalactiae; identical to SEQ ID NO: 8229

SEQ ID NO: 21924 - protein, 292 aa, Streptococcus agalactiae; identical to SEQ ID NO: 3544

SEQ ID NO: 21925 - protein, 843 aa, Streptococcus agalactiae
ATGAAACAAACAAAAGAAGGTCTTATGCAAGCTGTGTTTTTCATCACAGCTTGCGTCAGTGTTATATCAGCTATTTTAATTTGCCTCTTTCTCTTCTCTAGTGGTCTTCCAGCTATTACGAAAATCGGCTGGGGAAATTTTATATTTGGTAAAGTCTGGCATCCTAGTAATAATATTTTTGGCATCTTTCCAATGATTGTAGGTTCCTTATATGTTACAGCGGGAGCTTTACTTTTAGGAGGACCGATAGGTATCCTTACTGCTGTTTTTATGGCTTATTTCTGCCCAGAAAATATTTATAAGCCTTTAAAGTCAGCTATCAATTTAATGGCGGGAATCCCTTCAGTTGTTTATGGTTTCTTTGGACTCGTTGTTATTGTCCCTATGATAAGGCAATATATTGGTGGCTTTGGTATGGGAGTCTTAGCAGCTTCAATTTTGCTAGGAATTATGATTTTACCAACAATTGTTAGCATTTCAGAATCTTCTTTAAGAGCTGTTCCAGAGAGCTATTATGAAGGCGGTATTGCCCTTGGTGCCTCTCATGAACGAAGTGTCTTCTTTGCTGTTTTACCAGCTGCTAAACGTGGTATTTTAGCATCGGTTGTTTTGGGAATTGGACGTGCTATTGGTGAAACAATGGCTGTCATCATGGTAGCGGGTAATCAAGCTGACTTGCCTCAATCGCTGACATCAGGCGTTAGAACTCTAACCACTAATATTGTCATGGAAATGGGCTATTCTTCTGGTTTGCATCGTCAAGCCTTAATTGGTACAGCTGTGGTACTCTTTATCTTTATATTAATGATTAATATCAGTTTTTCAGCATTACAGAAAGAGGAA

SEQ ID NO: 21926 - protein, 281 aa, Streptococcus agalactiae
MKQTKEGLMQAVFFITACVSVISAILICLFLFSSGLPAITKIGWGNFIFGKVWHPSNNIFGIFPMIVGSLYVTAGALLLGGPIGILTAVFMAYFCPENIYKPLKSAINLMAGIPSVVYGFFGLVVIVPMIRQYIGGFGMGVLAASILLGIMILPTIVSISESSLRAVPESYYEGGIALGASHERSVFFAVLPAAKRGILASVVLGIGRAIGETMAVIMVAGNQADLPQSLTSGVRTLTTNIVMEMGYSSGLHRQALIGTAVVLFIFILMINISFSALQKEE

SEQ ID NO: 21927 - protein, 879 aa, Streptococcus agalactiae
ATGAAAAAACACAAAATACTATCTCTTTTGGCGGTATCTGGTCTTATGGGAATTGGCATCCTAGCAGGATGCTCAAATGATTCATCATCTTCATCTAAAGGGACAATTAACATTGTTTCTAGAGAGGAAGGGTCTGGAACTCGTGGAGCTTTCATAGAGTTATTTGGGATCGAGTCAAAAAATAAAAAGGGCGAAAAAGTAGACCATACTTCTGATGCAGCAACTGTTACCAATTCAACTTCAGTTATGCTAACCACTGTCTCTAAAGACCCGTCAGCTATTGGTTATTCTTCACTAGGTTCATTAAATAGTAGCGTTAAAGTGCTTAAAATTGATGGCAAAAATGCGACTGTAAAAGATATTAAATCAGGAAGCTATAAGATTTCTCGTCCTTTCAATATTGTAACAAAAGAAGGTAAGGAAAAAGAAGCAACAAAAGATTTTATTGATTATATCTTAAGCAAAGATGGGCAAGCAGTCGTTGAGAAAAATGGCTATATTCCACTTGACAATGCTAAAGCATATCAAGCAAAAGTGTCATCTGGTAAAGTTGTTATAGCAGGTTCAAGTTCAGTAACGCCGGTTATGGAAAAGATTAAAGAAGCCTATCATAAAGTAAATGCAAAAGTAGATGTTGAAATTCAACAAAGTGATTCTTCAACTGGGATTACAAGCGCAATTGATGGATCAGCAGATATAGGTATGGCATCACGTGAATTGGATAAGACAGAGTCATCCAAAGGGGTCAAAGCTACTGTTATTGCAACAGATGGTATTGCAGTAGTTGTTAATAAGAAAAATAAAGTTAATGATCTATCAACAAAACAAGTAAAAGACATTTTTACTGGAAAGACAACGTCTTGGTCTGACTTATCAAAG

SEQ ID NO: 21928 - protein, 293 aa, Streptococcus agalactiae
MKKHKILSLLAVSGLMGIGILAGCSNDSSSSSKGTINIVSREEGSGTRGAFIELFGIESKNKKGEKVDHTSDAATVTNSTSVMLTTVSKDPSAIGYSSLGSLNSSVKVLKIDGKNATVKDIKSGSYKISRPFNIVTKEGKEKEATKDFIDYILSKDGQAVVEKNGYIPLDNAKAYQAKVSSGKVVIAGSSSVTPVMEKIKEAYHKVNAKVDVEIQQSDSSTGITSAIDGSADIGMASRELDKTESSKGVKATVIATDGIAVVVNKKNKVNDLSTKQVKDIFTGKTTSWSDLSK

SEQ ID NO: 21929 - protein, 558 aa, Streptococcus agalactiae
ATGATTATTGCTATTCAAGGTGGTATGGCTGTAGGGAAAACCACAGCTTTGAAAATCATTGAGAAAGTTTACCCAAAAATCGCTATTAGTTTTGAGGACATTTCTCCAGTAGTTGATAAGATTAATAAACATCAGCTTGATAACAATAAATTAGACGATTATTGTGAAATTCAACAACTATTTATTCAGCATGAACGAGATAGATACGAACTTGTTAGAGATAATGAAATAGTGTTAATGGATTATGGAGCTGAGGAAATTGCTTTTTATACACAATACTTTCCAAAGGTGGCGGGTTATAGTTGGACTTTACCTTCTAATTTGTTACTAGAGGTAAATAGGCTAAAGGAATGTTTTGCTGATTATATTATTTTTCTAGATGCAGATAAGACGGTCCTATACCAACGTCAAAAAAATGATTTTAATAGACGGCGTCATTTTTTCAAATGGTATACTCATCACCTGTTGCCTGCTAAAAAACATTATTTAGACACATTTTCCAATGTTATTCATATTAATACAAATCATTTAAATGCTGAGGAAGTGGCTGAATTACCA

SEQ ID NO: 21930 - protein, 186 aa, Streptococcus agalactiae
MIIAIQGGMAVGKTTALKIIEKVYPKIAISFEDISPVVDKINKHQLDNNKLDDYCEIQQLFIQHERDRYELVRDNEIVLMDYGAEEIAFYTQYFPKVAGYSWTLPSNLLLEVNRLKECFADYIIFLDADKTVLYQRQKNDFNRRRHFFKWYTHHLLPAKKHYLDTFSNVIHINTNHLNAEEVAELP

SEQ ID NO: 21931 - protein, 738 aa, Streptococcus agalactiae
ATGCAACAGTATTTTGTAAATGGCAAAGCAGATGACTTTGTGACCATCGAGGACAAGGATACCATCAAGCACATGTTCAATGTCATGCGATTGACAGAAGATGACCAAGTGGTCTTGGTTTTTGATGATACCATCAAGCGTCTGGCAAAGGTGGTGGACAGCTCTGCCCATCGCTTCCAAATTCTAGAAGAGCTAGACAGCAATGTTGAAATGCCTGTCCAAGTGACCATCGCCTCAGGCTTTCCCAAGGGAGACAAGCTAGACCTTGTGACACAAAAGGCGACAGAATTGGGTGCAGCGGCTATCTGGGCCTTCCCAGCTGACTGGTCAGTCGTCAAGTGGGATGGCAAAAAACTGGCTAAAAAAGAAGATAAGCTGGCAAAAATTGCTATGGGCGCTGCAGAGCAGAGCAAGCGTAATCGTCTTCCTCAGGTTCGTTTATTTGAGAAGAAGGCTGACTTTCAAGCGGAGCTTAATGGCTTTGATAAAATTTTTATCGCCTATGAAGAGTCTGCCAAGGAGGGTGAAATGTCAGCGCTAGCCCAGAACTTGCAGACTGTAAAAGCAGGTGACAAGCTCCTCTTCATCTTTGGACCAGAAGGGGGCATTTCTCCAAAAGAAATCGCAGCTTTTGAAGAGGCTGGAGCGATAAAAGTGGGCCTGGGGCCACGCATCATGCGCACAGAAACAGCACCGCTCTATGCTCTAAGTGTTATTAGTTACTCAGCGGAGTTATTA

SEQ ID NO: 21932 - protein, 246 aa, Streptococcus agalactiae; identical to SEQ ID NO: 12508

SEQ ID NO: 21933 - protein, 951 aa, Streptococcus agalactiae
ATGAACACATGGAATGAACTAACGGTTCACGTGAATCGTGAGGCAGAGGAAGCTGTCTCGAATTTATTGATTGAAACTGGCAGTCAGGGGGTTGCCATTAGTGACTCGGCTGATTATCTTGGACAGGAGGATCGTTTCGGCGAGCTTTATCCTGAGGTGGAGCAATCTGATATGATCGCTATTACTGCCTATTATCCTGATACGCTTGATATTGAGGTGGTTAAGGCTGATTTGGCTGATCGTTTGGCTAATTTTGAAGGCTTTGGTCTTGCGACGGGTAGCGTCAACCTTGACAGTCAGGAATTGGTCGAAGAGGACTGGGCTGATAACTGGAAGAAGTACTATGAGCCAGCTCGCATTACCCATGATTTGACCATCGTGCCGTCATGGACTGACTATGAGGCTAAGGCTGGTGAGAAAATCATCAAGCTGGATCCTGGTATGGCTTTTGGGACTGGGACTCACCCAACGACTAAGATGAGTCTTTTTGCCTTGGAGCAAGTGCTTCGTGGTGGTGAGACGGTTATCGATGTGGGGACTGGTTCAGGCGTTTTGTCTATTGCTAGCTCTCTCTTGGGTGCCAAGGACATCTATGCCTTTGATTTGGATGTTGTTGCGGTGCGCGTGGCTCAGGAAAATATCGATATGAACCCTGGTACTGACAATATTCATGTGGCTGCTGGTGACCTGCTCAAAGGTGTCCAGCAAGAGGCAGATGTCATTGTTGCCAATATTTTGGCGGATATTTTGATCCATCTGACAGACGATGCCTACCGTTTGGTCAAGGATGAGGGTTATCTCATCATGTCTGGTATCATTTCTGAAAAATGGGATATGGTGCGTGAGAGTGCTGAAAAAGCTGGTTTCTTCCTTGAGACTCACATGGTTCAAGGTGAGTGGAATGCCTGCGTTTTCAAAAAGACAGATGATATTTCAGGAGTGATTGGCGGC

SEQ ID NO: 21934 - protein, 317 aa, Streptococcus agalactiae
MNTWNELTVHVNREAEEAVSNLLIETGSQGVAISDSADYLGQEDRFGELYPEVEQSDMIAITAYYPDTLDIEVVKADLADRLANFEGFGLATGSVNLDSQELVEEDWADNWKKYYEPARITHDLTIVPSWTDYEAKAGEKIIKLDPGMAFGTGTHPTTKMSLFALEQVLRGGETVIDVGTGSGVLSIASSLLGAKDIYAFDLDVVAVRVAQENIDMNPGTDNIHVAAGDLLKGVQQEADVIVANILADILIHLTDDAYRLVKDEGYLIMSGIISEKWDMVRESAEKAGFFLETHMVQGEWNACVFKKTDDISGVIGG

SEQ ID NO: 21935 - protein, 306 aa, Streptococcus agalactiae; identical to SEQ ID NO: 12511

SEQ ID NO: 21936 - protein, 102 aa, Streptococcus agalactiae; identical to SEQ ID NO: 12512

SEQ ID NO: 21937 - protein, 714 aa, Streptococcus agalactiae
ATGAAAACAGTTAAAGAAGTCAGTATCTTAAGCGGTGTAAGTGTGTGCACCTTGCATCACTATGATAAAATCAGTTTATTCCCACCTACCGCCCTATCCGAAGCAGGCTATCGACTTTATGACGATGAAGCATTGATTCGCCTGCAAGAAATTTTGCTATTTCGTGAGTTGGAATTCCCTCTCAAAGATATCAAATACCTGCTTGAGCAAGCAAAAGAGGAAAGGCAAGACTTATTAGCCCAACAAATCAAATTGCTTGAATGGAAAAGATCGCACCTTGAGCAGGTTATCACCCATGCGAAACGATTACAAGAAAAAGGAGATGATTATATGAATTTCGATGTTTATAATAAAACAGAATTAGAACAATTACAAGCTGAAGCAAAAGAAAAATGGGGACAAACAGCAGCCTACCAAGAATTTGCTCAAAAACATGCTTCAGATGACTTTGCACAAATTAGCCAAGAAATGGCAAAAATAATGGTACAATTTGGGCAATTAAAGACACAAAATGTATCTGATGAATCTGTTCAAATGTGTGTGAAACGGCTACAAGACTATATCTCTCAGCATTTTTACACCTGTACCAATGAAATCCTTGCTGGACTAGGACAAATGTATCAATCAGATGACCGGTTTAGTCAATCAATTAACAAAGCTGGTGGAGCAGGAACAAGTGAGTTTGTCAGCCAAGCTATTGCTTACTATTGCCAA

SEQ ID NO: 21938 - protein, 238 aa, Streptococcus agalactiae
MKTVKEVSILSGVSVCTLHHYDKISLFPPTALSEAGYRLYDDEALIRLQEILLFRELEFPLKDIKYLLEQAKEERQDLLAQQIKLLEWKRSHLEQVITHAKRLQEKGDDYMNFDVYNKTELEQLQAEAKEKWGQTAAYQEFAQKHASDDFAQISQEMAKIMVQFGQLKTQNVSDESVQMCVKRLQDYISQHFYTCTNEILAGLGQMYQSDDRFSQSINKAGGAGTSEFVSQAIAYYCQ

SEQ ID NO: 21939 - protein, 468 aa, Streptococcus agalactiae
ATGATTACTTTACAAAAGGCGGAAGCTAGTGATTTAGAGAAGATTATTGCCATTCAGAGAGCTAGCTTTAAGGCAGTCTATGAGAAATATCACGATCAATACGATCCCTATGTGGAAGAAGTTGAGCAGATTCGATGGAAACTAGTGAAGCGACCAGATTGTTTCTATCATTTTGTCCTTGTTGATGAGACAATTGTTGGTTTTCTTAGATTGGTTATCAAGGATGAGGAGAAGCGTGCTTGGCTTGGTACGGCGGCTATTCTTCCCCAATATCAAGGGCAGGGCTACGGCTCAGTAGCGATGGCTTTATTAGAGAAAACCTATCCTAAGCTTACAAAGTGGGATTTATGTACGATTGCGCAAGAAAAACTAATGGTCAGTTTTTATGAAAAATGTGGTTATCATTCAACCCATACCGAACCTGAGCAAGAAGGAATGGATATGGTCTATATGACAAAGAAGATAGAA

SEQ ID NO: 21940 - protein, 156 aa, Streptococcus agalactiae
MITLQKAEASDLEKIIAIQRASFKAVYEKYHDQYDPYVEEVEQIRWKLVKRPDCFYHFVLVDETIVGFLRLVIKDEEKRAWLGTAAILPQYQGQGYGSVAMALLEKTYPKLTKWDLCTIAQEKLMVSFYEKCGYHSTHTEPEQEGMDMVYMTKKIE

SEQ ID NO: 21941 - protein, 456 aa, Streptococcus agalactiae
ATGGATAGTTTTGATGAGTTATTTGATTTCTCAGGTGCAAAGATCGCTCTTTTCTGTGAAGGAAAGATTTTGACCAGCCTAAGAGATGATTTTCCAGATTTGCCTTATGCAGGCTTTTGGGACTTACCAGGAGGTGGTCGTGAGGACAATGAAACACCTTTGGAATGTCTTTTTCGTGAAGTTGATGAAGAATTAAGTCTGACCTTAACTCGAAACCATATTGATTGGGTCAAGACTTATAGGGATATGTTGAAGCCTGATAAATTATCAGTTTTTATGGTTGGACATATCAGTCAGAAAGAGTACGATAGCATTGTTCTAGGTGATGAAGGACAAGGCTACAAGCTCATGTCCATTGACGAATTTCTAAGCCATAAAAAGGTCATTCCTCAGTTGCAGGAGAGGTTGAGAGATTATTTGGAGGTGGAAGATGATTACTTTACAAAAGGCGGAAGC

SEQ ID NO: 21942 - protein, 152 aa, Streptococcus agalactiae
MDSFDELFDFSGAKIALFCEGKILTSLRDDFPDLPYAGFWDLPGGGREDNETPLECLFREVDEELSLTLTRNHIDWVKTYRDMLKPDKLSVFMVGHISQKEYDSIVLGDEGQGYKLMSIDEFLSHKKVIPQLQERLRDYLEVEDDYFTKGGS

SEQ ID NO: 21943 - protein, 306 aa, Streptococcus agalactiae; identical to SEQ ID NO: 12519

SEQ ID NO: 21944 - protein, 102 aa, Streptococcus agalactiae; identical to SEQ ID NO: 12520

SEQ ID NO: 21945 - protein, 468 aa, Streptococcus agalactiae
ATGGCTAAATTTGGATTTTTGTCTGTTCTGGAAGAAGAATTGGACAAGCACTTAAACTATGACTTTGCCATGGATTGGGACAAGAAAAATCACGCTCTTGAGGTGACCTTTGTCCTAGAAGCGCAAAACAGCTCTGCTATTGAAACCGTGGACGACCAAGGGGAGACGAGCAGCGAGGACATCGTTTTTGAGGACTATGTACTCTTTTACAACCCTGCCAAGTCTCGCTTTGATGCTGAGGACTATCTGGTGACTATCCCCTATGAGCCTAAGAAGGGCTTGTCGCGTGAGTTTCTGGCTTATTTTGCGGAGACTCTCAACGAGGTTGCCACTGAAGGGCTGAGCGACCTCATGGACTTCCTCACTGATGACAGTATCGAAGAGTTCGGTCTTTCTTGGGATGCGAATACTTTTGAAAATGGCAGAGCAGAGCTGAAAGAGACAGTGTTTTATGCATATCCGAGGTAT

SEQ ID NO: 21946 - protein, 156 aa, Streptococcus agalactiae
MAKFGFLSVLEEELDKHLNYDFAMDWDKKNHALEVTFVLEAQNSSAIETVDDQGETSSEDIVFEDYVLFYNPAKSRFDAEDYLVTIPYEPKKGLSREFLAYFAETLNEVATEGLSDLMDFLTDDSIEEFGLSWDANTFENGRAELKETVFYAYPRY

SEQ ID NO: 21947 - protein, 579 aa, Streptococcus agalactiae
ATGAACTTCCTAGTGTCTGACGACACTTCGTCGTTCCCTATTTCTTTACGAAAATTTTCGGTAAACCGAACTGTCCCTTTGTATCATGTTATGATTATCAGACCTATGCAGGACTGCGACCGTGAGGCAGTTCTGACCTTACAAAATACTGGCTGGACTGCTCTTACCTCTCCTGTCTATGACCGCAAGTGGACTGAGAGTGACTTGGAGAAGAATCTGGCAAATGGCATGTCCTTCTTTGTCGCTGAGGTCGATGATAAGATCGCTGGCGTCTTGGACTTTGGTCCCTACTATCCTTTCCCAGCTGGCAAGCATGTTGCCACTTTCGGCATTCTCATCGCTGAACCCTACCAAGGTCAAGGACTGGGTAAAGCTCTCTTGAAAGCTCTGCTAACTGAGGCTAAAGCTCAAGGTTATATCAAGATTGCCATGCATGTCATGGGCAATAACAGCAGAGCCATTTCCCTCTATCAAAAATACGGGTTTACCGAAGAGGCTCGAATCACTAAAGCCTTTTTCATTGAAAATCATTATGTTGATGCTTTAATTTTCGCAAAAGATTTGGAGAATAATCATGGC

SEQ ID NO: 21948 - protein, 193 aa, Streptococcus agalactiae
MNFLVSDDTSSFPISLRKFSVNRTVPLYHVMIIRPMQDCDREAVLTLQNTGWTALTSPVYDRKWTESDLEKNLANGMSFFVAEVDDKIAGVLDFGPYYPFPAGKHVATFGILIAEPYQGQGLGKALLKALLTEAKAQGYIKIAMHVMGNNSRAISLYQKYGFTEEARITKAFFIENHYVDALIFAKDLENNHG

SEQ ID NO: 21949 - protein, 1266 aa, Streptococcus agalactiae
ATGGCTGACAATCTTGCTCTACGTATGCGTCCTCGCAATATTAATGAAATCATTGGGCAGCAACATCTCGTTGGTAATGGCAAAATTATTGATCGAATGGTTGCAGCTAATATGTTATCTTCCATGATCCTATATGGACCACCAGGTATCGGGAAGACTTCTATTGCTTCTGCTATTGCTGGTACTACTAAATATGCCTTTCGTACTTTTAATGCCACTGTTGATAGTAAAAAACGTCTTCAAGAAATTGCAGAAGAAGCTAAATTTTCTGGTGGCTTAGTTTTATTACTTGACGAGATCCATAGACTTGACAAGACAAAACAAGATTTTCTTTTACCTTTACTTGAGAATGGCAATATTATTATGATTGGAGCAACAACTGAAAATCCTTTCTTTTCAGTAACTCCTGCCATTAGAAGTAGGGTACAAATTTTTGAGTTAGAACCTCTTTCTAACGAGGATATTAAAAAAGCCATTCAACTAGCAATTTCCGATAAAGAACGGGGATTTCCTTTTTTAGTGACAATTGATGATGAGGCGCTAGATTTCATTATTACCGCCACAAATGGAGACCTGCGATCTGCTTATAATTCCTTGGATCTAGCAGTCATGTCTACTTCTCCTAATGAAGATGGTAGCCGTCATATTAGTCTAGAGACAATGGAAAATAGTCTGCAGCGTAGTTATATTACAATGGATAAAAATGGAGATGGGCATTATGATGTCCTATCAGCCTTACAAAAATCAATTAGAGGTTCTGATGTCAATGCAAGCCTGCACTATGCCGCTCGTTTAGTAGAAGCTGGAGATTTACCTAGTTTAGCAAGACGTTTGACCATTATTGCTTATGAAGATATCGGCTTAGCTAACCCCGAAGCACAAATACATACTGTGACTGCATTGGAAGCTGCCCAACGCATTGGTTTTCCAGAAGCTCGTATTCTTATTGCTAACATTGTTGTGGATTTAGCTCTATCACCTAAATCAAATTCAGCCTATTTGGCTATGGATGCAGCCTTAGCTGATTTACGTCGTTCAGGAAATTTACCTATTCCACGTCACCTAAGAGATGGACATTACAGCGGTAGTAAAACCTTGGGCAATGCAAAGGATTACAAGTACCCTCACGCCTATCCTGAAAAATGGGTTAAACAACAATACTTACCAGATAAACTAGTAGGACATAATTATTTTGAAGCCAATGAAACTGGTAAATACGAACGCGCACTTGGTTCAAATAAAGAGCGCATTGATAAGCTCTCAGAC

SEQ ID NO: 21950 - protein, 422 aa, Streptococcus agalactiae
MADNLALRMRPRNINEIIGQQHLVGNGKIIDRMVAANMLSSMILYGPPGIGKTSIASAIAGTTKYAFRTFNATVDSKKRLQEIAEEAKFSGGLVLLLDEIHRLDKTKQDFLLPLLENGNIIMIGATTENPFFSVTPAIRSRVQIFELEPLSNEDIKKAIQLAISDKERGFPFLVTIDDEALDFIITATNGDLRSAYNSLDLAVMSTSPNEDGSRHISLETMENSLQRSYITMDKNGDGHYDVLSALQKSIRGSDVNASLHYAARLVEAGDLPSLARRLTIIAYEDIGLANPEAQIHTVTALEAAQRIGFPEARILIANIVVDLALSPKSNSAYLAMDAALADLRRSGNLPIPRHLRDGHYSGSKTLGNAKDYKYPHAYPEKWVKQQYLPDKLVGHNYFEANETGKYERALGSNKERIDKLSD

SEQ ID NO: 21951 - protein, 192 aa, Streptococcus agalactiae
GTGGATTCGTATGCCACAGCAATGTTTCTATGTCTTTATGATACCACTTTTTATAAAATTTTCAAGCAAAATTATCGATTTTTGAAATCGATTGCGATTTTTAAAACTAGCAATCAGTCTGAGAGCTTATCAATGCGCTCTTTATTTGAACCAAGTGCGCGTTCGTATTTACCAGTTTCATTGGCTTCAAAA

SEQ ID NO: 21952 - protein, 64 aa, Streptococcus agalactiae
MDSYATAMFLCLYDTTFYKIFKQNYRFLKSIAIFKTSNQSESLSMRSLFEPSARSYLPVSLASK

SEQ ID NO: 21953 - protein, 507 aa, Streptococcus agalactiae
TTGTTAGAAAATGACATTCCTATGGCGAGTAATATTTTGGCAATGAAAGATTTTGGGGATCCTCATAATTTCAGTGCTGTATCACCACAGTTGAAAGCTTCATCAGAACATTTAAAAGAGATTATGAAAAAATATCCAAATGCAAAAATAAACATTGGTGGACATTCATTAGGAGGTATGGATGCTCAATATGCTGTTGTAGATATTACAGCTTACGGAGCAAGACATACTTACGGTAGTGTTAAAGTCCAAGAAGGAGTACCTTTAGAAGTATTAGCAAAATGGTTTGGTCACAAAGATACGTCTATGTTAAGAAGTATATATATATACATTTATTGGACGAGACAAAAAATGAGTGGTTTGAAAGAGAAAAACTATCTGGTGGGCAAACTGATTTTTGACAAGCTAAAAAGCCCTATAAATAAGGCTTTTTTTCATTTTTGTACTATGCCCCCTACAGGGCTCGAACCTGTGACCCATAGATTAAGAGTCTACTGCTCTACCAAC

SEQ ID NO: 21954 - protein, 169 aa, Streptococcus agalactiae
MLENDIPMASNILAMKDFGDPHNFSAVSPQLKASSEHLKEIMKKYPNAKINIGGHSLGGMDAQYAVVDITAYGARHTYGSVKVQEGVPLEVLAKWFGHKDTSMLRSIYIYIYWTRQKMSGLKEKNYLVGKLIFDKLKSPINKAFFHFCTMPPTGLEPVTHRLRVYCSTN

SEQ ID NO: 21955 - protein, 276 aa, Streptococcus agalactiae
ATGAAAAAATATATTGATGAAGAAAAATTACAAATCGCAATGTCAGAATATAAAACAATTCATCCCAACGCCAGATTAAAGGATCAATATGATAACACAATTGGAGTTGTTTCGGAGGTTTACGACAATACTTCTCATTCTGGAGAACAGGTTTATGCTGTGGTTGATAATCGTCATATTCCAAAAGAAGATGTAAAAGAGGTGACGGTACTTTTTCGTGGATCAACATCTCCTCAGGAATTTATTAATAATCTTGCAGATGTGACTTTGGATTGT

SEQ ID NO: 21956 - protein, 92 aa, Streptococcus agalactiae
MKKYIDEEKLQIAMSEYKTIHPNARLKDQYDNTIGVVSEVYDNTSHSGEQVYAVVDNRHIPKEDVKEVTVLFRGSTSPQEFINNLADVTLDC

SEQ ID NO: 21957 - protein, 384 aa, Streptococcus agalactiae
ATGAAGAAAAAATATTGGATATTACTAATATTACTATTAACAGTTTTATCAGGAGGCGGATATATGGTTTTTAAACAACATACAGAAAAAGAAAAAATGATTGCAATTGCACACAGTGCAGAAGCGATGCAAATTTATGAGAAGCATATGAAAGCAAATGATTCGCGCGCTTTTTCAGAGCAAGGAATTATTCATAATTATAAAATTAACGATTCAGAACTCAATTATAATCCTATGGGAGGAATGGAGGTTACTGTTTATGTGAATAATGATACCAATAAATATTTTCAATTTACTATTTTAGATAATGGAAATGGTAAACTTGAATCTGGGAGCTATATTATAAGTGCAGATTTAGATAATGATTTAGAAACCAATAAAAAA

SEQ ID NO: 21958 - protein, 128 aa, Streptococcus agalactiae; identical to SEQ ID NO: 17330

SEQ ID NO: 21959 - protein, 570 aa, Streptococcus agalactiae
ATGATTTCAGAGGAAAGTTACAGATATTTAGTTGAGGATGCTTATCGAGTTGATTCAAAAAAAGTAAAAATACCTCTGAAAAGAGGTGATATTGTAGGGAACAGTGACTATGTTATTATTGAACCACCTATAGATAATACTTCAAATGGTATGCAAGCTATGGTAGTTGCTCCGATAAAAGAAGGAATGACAGCTAAACCAGATACTAGTGAAATAGTGATTGCTTATGCAGGTACTAATTTAGGTGAGCGTTTAGACATAGCTACAGATGTTGAAATGGTTGCTGGAGGGGATACATATTTACTTGCTGACCCTAAAACCAAGACTTTTAGGAAATCTCAGGGAAAATCAGCACTAGAGTATGCCGAAAAAATATCGAGTAAATATCCTAATTCAGAAATTACTACAACCGGTCACTCCTTAGGGGAATCAGAGGCACTATATGTCGCTTTAAAAATGGGTTGGATGAATGTTGGCTATAACGGTTCAGACCTTCATCACATGATATCAAATCACGGAATAGATTATATAAAATCTCATCCGGGACAATTTAGAAAAAATCGAAAAATA

SEQ ID NO: 21960 - protein, 190 aa, Streptococcus agalactiae
MISEESYRYLVEDAYRVDSKKVKIPLKRGDIVGNSDYVIIEPPIDNTSNGMQAMVVAPIKEGMTAKPDTSEIVIAYAGTNLGERLDIATDVEMVAGGDTYLLADPKTKTFRKSQGKSALEYAEKISSKYPNSEITTTGHSLGESEALYVALKMGWMNVGYNGSDLHHMISNHGIDYIKSHPGQFRKNRKI

SEQ ID NO: 21961 - protein, 330 aa, Streptococcus agalactiae
ATGAAAAACTTATTTGCAACAACAGAAGCATCATCAAGGAAACAGGAACAAGATAGAATTGTCAATTACATAAAACAACATGTTGAGTTAACAAATGGTAATCAAATAAAAAAAATTGAGTTTATCGACTTTCAAAAAAATGAGATGACAGGTACATGGGGAATTTCTACTAAAATTAATGAACAATTTTCGATTAGTTTTTCTGAAGATAGAATTGGTGGTAAACTTAGAGCATTAGGATATCAACCGAATGAAATAGGTTTTTCAAAGGACATCAATAGTAATAATCAAAATGTTAATGATATTGAAGTGATTTATATGAAGGAAGAA

SEQ ID NO: 21962 - protein, 110 aa, Streptococcus agalactiae
MKNLFATTEASSRKQEQDRIVNYIKQHVELTNGNQIKKIEFIDFQKNEMTGTWGISTKINEQFSISFSEDRIGGKLRALGYQPNEIGFSKDINSNNQNVNDIEVIYMKEE

SEQ ID NO: 21963 - protein, 126 aa, Streptococcus agalactiae
GTGATTGCTTATGCAGGTACTATTTCAGGTGTTCGTTTAGACATAGCTACAGATGTTGAAATGGTTGCTGGAGGGGATACATATTTACTTCAGGTGAGAAATGGAAATTACCTGAAGAAACCACAG

SEQ ID NO: 21964 - protein, 42 aa, Streptococcus agalactiae
MIAYAGTISGVRLDIATDVEMVAGGDTYLLQVRNGNYLKKPQ

SEQ ID NO: 21965 - protein, 288 aa, Streptococcus agalactiae
ATGTCACAAATTAAATTAACTCCTGAAGTACTCCGTGCGTCAGCACAAAAATACACAATAGGATCACAATCAATTACAGATGTGTTAACTGCTTTAACACAAGAGCAAGCAGTTATTGATGAGAATTGGGGTGGTACAGCATTTGACAGTTTTGAAGCACAGTTCAATGAATTGTCACCAAAAATCACACAATTTGCACAATTGTTAGAAGATATCAATCAACAACTATTAAAAGTAGCAGATGTTGTTGAACAAACAGACTCTGATATTGCTTCTCAGATTAATCAG

SEQ ID NO: 21966 - protein, 96 aa, Streptococcus agalactiae
MSQIKLTPEVLRASAQKYTIGSQSITDVLTALTQEQAVIDENWGGTAFDSFEAQFNELSPKITQFAQLLEDINQQLLKVADVVEQTDSDIASQINQ

SEQ ID NO: 21967 - protein, 125 aa, Streptococcus agalactiae
GTGAGTATCAATTATATCAAGGAGTTAATGATAAGAAAAGTATGGACTTTACTAATATTACTATTAACAGTTTTGGGGAGGAAGTGGCTATATGGGTTTTTAACAACATACTGGGAAAAGAAAAA

SEQ ID NO: 21968 - protein, 43 aa, Streptococcus agalactiae
MSINYIEGVNDEEKVLDFTNITINSFGEEVAIWVFNNILGKEK

SEQ ID NO: 21969 - protein, 306 aa, Streptococcus agalactiae
ATGGACGTATTAATTATCGAAGATGATCCTATGGTGGAATTTATCCACCGCAATTACCTTGAAAAACTCAATTATTTTCAAAACATCTATTCAACTGCTAGTCAAACACAAGCTATTGCTTATCTTAATGACATTAAAATCCAACTTGTTCTTTTAGATATTCATATTAAAGAAGGCAATGGTCTAGAATTATTAAAGTTATTACGCAATCAACACCAAAATACCGAAGTCATTGTTATTTCAGCAGCCAACGAGGCGCACACTGTCAAAGAAGCATTTCATTTAGGTATCTTTCCAGCACAGTAT

SEQ ID NO: 21970 - protein, 102 aa, Streptococcus agalactiae
MDVLIIEDDPMVEFIHRNYLEKLNYFQNIYSTASQTQAIAYLNDIKIQLVLLDIHIKEGNGLELLKLLRNQHQNTEVIVISAANEAHTVKEAFHLGIFPAQY

SEQ ID NO: 21971 - protein, 507 aa, Streptococcus agalactiae
ATGGTAGAATTAAATTTAAATCATATTTACAAAAAATATCCAAGTGCATCGCATTATTCTGTTGAAGACTTTGACTTGGATATTAAAGACAAAGAATTTATTGTTTTTGTTGGACCATCAGGTTGTGGGAAATCAACAACACTTCGTATGATCGCAGGTCTTGAAGATATTAGTGAAGGTGAGCTCAAGATTGATGGCGAAGTTGTCAATGACAAATCACCTAAAGATCGTGATATTGCTATGGTTTTCCAAAACTATGCTCTTTATCCACATATGACTGTTTACGATAATATGGCTTTTGGGCTCAAATTGCGTAAATTCTCAAAACAAGAAATTGATAAGCGCGTTCGTGAAGCAGCAGCTAATATTGGCCTTACTGAATTCTTAGAGCGCAAACCTGCGGATTTGTCAGGTGGACAACGCCAACGTGTTGCTATGGGACGTGCTATTGTGCGTGATGCCAAAGTGTTCTTAATGGATGAGCCTTTATCTAACTTNNNNNTTAAT

SEQ ID NO: 21972 - protein, 169 aa, Streptococcus agalactiae
  VARIANT 166, 167, 168: Xaa = Any Amino Acid
MVELNLNHIYKKYPSASHYSVEDFDLDIKDKEFIVFVGPSGCGKSTTLRMIAGLEDISEGELKIDGEVVNDKSPKDRDIAMVFQNYALYPHMTVYDNMAFGLKLRKFSKQEIDKRVREAAANIGLTEFLERKPADLSGGQRQRVAMGRAIVRDAKVFLMDEPLSNXXXN

SEQ ID NO: 21973 - protein, 543 aa, Streptococcus agalactiae
ATGAGTGAGACGGATGTTGCTTTTGTAAAATTTGCCTTAAATTACGCAACCGCAGCTCATTATTATCAAGCAAGAAAGTCGGGCGAGCCCTACATTATTCATCCAATCCAAGTAGCAGGTATTCTTGCAGATTTACACCTTGATGCCGTTACGGTAGCTTGTGGTTTTTTACATGATGTTGTAGAAGATACGGAAATTACCCTTGATGAGATTGAAACTGATTTTGGCAAGGATGTTCGCGATATTATTGACGGTGTAACAAAATTGGGTAAAGTGGAGTACAAATCTCATGAAGAACAGTTAGCAGAAAATCACCGTAAAATGTTAATGGCTATGTCTAAGGATATCCGTGTTATTTTGGTTAAGCTCGCTGATCGCTTACATAATATGAGAACCCTTAAACACCTCAGAAAAGATAAACAAGAGCGTATTTCACGTGAGACTATGGAAATATACCGCTCCTTTAGCGCATTCGTTTGGGGATTAGTCGTATCAAGTGGGGGGAATTTAAGGAAGGAATTTATTCTTTTTTTCGTTAACCTT

SEQ ID NO: 21974 - protein, 181 aa, Streptococcus agalactiae
MSETDVAFVKFALNYATAAHYYQARKSGEPYIIHPIQVAGILADLHLDAVTVACGFLHDVVEDTEITLDEIETDFGKDVRDIIDGVTKLGKVEYKSHEEQLAENHRKMLMAMSKDIRVILVKLADRLHNMRTLKHLRKDKQERISRETMEIYRSFSAFVWGLVVSSGGNLRKEFILFFVNL

SEQ ID NO: 21975 - protein, 138 aa, Streptococcus agalactiae
ATGATCCCTGATTTGTCAGGGAAGTTTGTAGAAGCTTCTGGTGAGAGTGCGACTAGTCGTAAGGTTAGCTCTGAGCAGAATAGCAATCTTGAAGAAGCTATGGAAGCTTTGTTAGCGTTGGGGTATAAGGCGACTGAA

SEQ ID NO: 21976 - protein, 46 aa, Streptococcus agalactiae
MIPDLSGKFVEASGESATSRKVSSEQNSNLEEAMEALLALGYKATE

SEQ ID NO: 21977 - protein, 387 aa, Streptococcus agalactiae
ATGAAGGCTCAGGCGATTGTCACAAGCCAAGGGAGAATTGTTTCTTTGGATATTGCAGTGAACTATTGCCACGATATGAAGTTGTTCAAAATGAGTCGCAGAAACATCGGAACAGCTGCTAAAATCTTGGCAGACAGTGGGGTATCAGGGATCATGAAGATGTATTCACAAGCGCAAACTCCGAGGAAATCAAGCAAACTTAAGCCACTAACTCTTGAAGATAAAACCTATAACCATACGCTATCCAAAGAGAGAATCAAGGTTGAGAATATTTTTGCCAAAGTAAAAACGTTTAAAATATTTTCAACAACCTATCGAAATCGACGCAAACGGTTTGGATTACGAATGAATTTGATTGCTGGAATGATCAACCGTGAACTAGGATTT

SEQ ID NO: 21978 - protein, 129 aa, Streptococcus agalactiae
MKAQAIVTSQGRIVSLDIAVNYCHDMKLFKMSRRNIGTAAKILADSGVSGIMKMYSQAQTPRKSSKLKPLTLEDKTYNHTLSKERIKVENIFAKVKTFKIFSTTYRNRRKRFGLRMNLIAGMINRELGF

SEQ ID NO: 21979 - protein, 381 aa, Streptococcus agalactiae; identical to SEQ ID NO: 6713

SEQ ID NO: 21980 - protein, 127 aa, Streptococcus agalactiae; identical to SEQ ID NO: 880

SEQ ID NO: 21981 - protein, 96 aa, Streptococcus agalactiae
ATGGTTATTAAATGGAATGTAACCTCCTATGATAAGCTAGCCTTTATAAATAACTTTGCATTAAAAAAGTGGAGATGGAATGAAGAAGATATGAAA

SEQ ID NO: 21982 - protein, 32 aa, Streptococcus agalactiae
MVIKWNVTSYDKLAFINNFALKKWRWNEEDMK

SEQ ID NO: 21983 - protein, 615 aa, Streptococcus agalactiae
ATGTTTATTAATAATTACACCTTAAAAATAGGAAATAGAATACTTTTAGAGAATACTAACTTAGACTTTGAAGAAGGGGAAATAAATCATCTTTTAGGTAGGAATGGATCAGGTAAATCTCAACTAGCTAAAGATTTTATCATAAATAGAGGGAATTATTTTTCAAATGATATTTATGAAGATACGCTGATTATTTCGAGTTATTCTAATCTTCCTAGTGATGTTACCATTAACGATTTAGAAAGGACAATTCCATGGAAGCTTTCTAAAGAAATTTATCAGTTATTGAATATTAATCAAATAAGTAAAACGGTTAAGTTAAAGCAATTAAGTGATGGGCAGAAACAAAAGGTGAAATTATTAGTTTTGTTGTCTTTAGACAAGCATATTATTATACTTGATGAAATTACTAATGCTTTAGATAAAAAGTCTGTTGATGAGATAAACGTATTTTTGCAAAACTATATTCAGTATTATCCCGAAAAAATTATTATTAATATTTCACATGATATCAATAATATCAGGTCTTTAAAGGGAAACTATTTTTTGATTGATAATCAAAAAATCCGTAAAGTAGATACATTAGATGATGCTATTAGTTGGTATTTAGGAGAA

SEQ ID NO: 21984 - protein, 205 aa, Streptococcus agalactiae
MFINNYTLKIGNRILLENTNLDFEEGEINHLLGRNGSGKSQLAKDFIINRGNYFSNDIYEDTLIISSYSNLPSDVTINDLERTIPWKLSKEIYQLLNINQISKTVKLKQLSDGQKQKVKLLVLLSLDKHIIILDEITNALDKKSVDEINVFLQNYIQYYPEKIIINISHDINNIRSLKGNYFLIDNQKIRKVDTLDDAISWYLGE

SEQ ID NO: 21985 - protein, 108 aa, Streptococcus agalactiae; identical to SEQ ID NO: 8361

SEQ ID NO: 21986 - protein, 36 aa, Streptococcus agalactiae; identical to SEQ ID NO: 8362

SEQ ID NO: 21987 - protein, 612 aa, Streptococcus agalactiae
ATGTTATATAAATTACACCTAAAAATAGAAAATAGAATACTTTTAGAGAATACTAACTTAGACTTTGAAGAAGGGGAAATAAATCATCTTTTAGGTAGGAATGGATCAGGTAAATCTCAACTAGCTAAAGATTTTATCATAAATAGAGGGAATTATTTTTCAAATGATATTTATGAAGATACGCTGATTATTTCGAGTTATTCTAATCTTCCTAGTGATGTTACCATTAACGATTTAGAAAGGACAATTCCATGGAAGCTTTCTAAAGAAATTTATCAGTTATTGAATATTAATCAAATAAGTAAAACGGTTAAGTTAAAGCAATTAAGTGATGGGCAGAAACAAAAGGTGAAATTATTAGTTTTGTTGTCTTTAGACAAGCATATTATTATACTTGATGAAATTACTAATGCTTTAGATAAAAAGTCTGTTGATGAGATAAACGTATTTTTGCAAAACTATATTCAGTATTATCCCGAAAAAATTATTATTAATATTTCACATGATATCAATAATATCAGGTCTTTAAAGGGAAACTATTTTTTGATTGATAATCAAAAAATCCGTAAAGTAGATACATTAGATGATGCTATTAGTTGGTATTTAGGAGAA

SEQ ID NO: 21988 - protein, 204 aa, Streptococcus agalactiae
MLYKLHLKIENRILLENTNLDFEEGEINHLLGRNGSGKSQLAKDFIINRGNYFSNDIYEDTLIISSYSNLPSDVTINDLERTIPWKLSKEIYQLLNINQISKTVKLKQLSDGQKQKVKLLVLLSLDKHIIILDEITNALDKKSVDEINVFLQNYIQYYPEKIIINISHDINNIRSLKGNYFLIDNQKIRKVDTLDDAISWYLGE

SEQ ID NO: 21989 - protein, 684 aa, Streptococcus agalactiae
ATGAGAGATGAGCAAGAAATATATAATTTGGTTTTAAACATAGCAAATCGAGATAAGAGAATCGAAGCTGTACTATTGAATGGATCTCGGGCGAACCCAAATGTACCGAAAGATGATTTTCAAGATTATGATATTGTTTTTGTTACTAATTTTATAGAAGATATTATTTCTGACACTTATTATCATAAAAAATTCGGTGATATTCTTATAATGCAGAAACCAAATGAGTTTAGAAATAAGATGGAATACAATTGCTTTGCTTACTTAATGCAGTTTCAAGATCTGACGAGGATTGATTTAAGGCTTATTAAACCAGAATTCTTGGAGGATTATTTAGATGATGCTTTTTCAAAAGTACTTTTAGATAAAAAGAATAAATATCTTGATTATAATTTTGAAAGAAGTGCACTGTACGAAACAAAGCAATTGTCAGAAGATGAAATCAACAAAATTCTTAATGAAATATATTGGGTTAGTACTTATGTAGTCAAGGGGATAGCAAGAAATGATATTATTTATTCAGAGTTTATGATATCTAATCCTATTAAAAATGCTTTTATTAAACTTCTAAAACAAAAAATATTAATAGAAAAAGAGCTTGATTCATTATCTTTTGGAAAGCTCGACAAGGATATCTTGCAATATATTACAGATAAAGATCAACTATTGAAAATTTTTTCAAAA

SEQ ID NO: 21990 - protein, 228 aa, Streptococcus agalactiae
MRDEQEIYNLVLNIANRDKRIEAVLLNGSRANPNVPKDDFQDYDIVFVTNFIEDIISDTYYHKKFGDILIMQKPNEFRNKMEYNCFAYLMQFQDLTRIDLRLIKPEFLEDYLDDAFSKVLLDKKNKYLDYNFERSALYETKQLSEDEINKILNEIYWVSTYVVKGIARNDIIYSEFMISNPIKNAFIKLLKQKILIEKELDSLSFGKLDKDILQYITDKDQLLKIFSK

SEQ ID NO: 21991 - protein, 549 aa, Streptococcus agalactiae
ATGGAAGCAAGTGATGTAATCAAAAAGATAGAAAATAATTATCCAATTGATGAGGATGTTTTAAATTTTTTATTAGATCATATAGGAGATTGGAACCCGAGAGTTCGAGATGAAATAGTATATGGGTCTTGGGTTAAATTAGTAATAGAACATAAACTGATGCAAAGCCAGAAATTAAATATCCTTCAGAGAGTTTTAAGGGATAAATTTCTTTTACAAGGATTAGGAGTACCCAACAGTAATACTGTGTTAAACAGATCTTTTACTGCTCTATTACTAGCTTTATTATTGGAGGACTCAAATAATAAAGGTTGGATATCTGAAGAAGATCAGATAAAAATTATGAATCAGGCATTCTCCTGGCTTATAGATGAACCTGATTTTAGAGGCTTTGACGAAGAGCTTGGATGGATACATGCCTTTGCTCATGGAGCTGATTTATTAACAGAAATAGTCAAGATGAAATGTTTTTCAAAAGATGATAGTTTAAAAATCTTAACTATCATAAAAAGAGTGATGATAACTGATGACATACTAACATTAAACGGT

SEQ ID NO: 21992 - protein, 183 aa, Streptococcus agalactiae
MEASDVIKKIENNYPIDEDVLNFLLDHIGDWNPRVRDEIVYGSWVKLVIEHKLMQSQKLNILQRVLRDKFLLQGLGVPNSNTVLNRSFTALLLALLLEDSNNKGWISEEDQIKIMNQAFSWLIDEPDFRGFDEELGWIHAFAHGADLLTEIVKMKCFSKDDSLKILTIIKRVMITDDILTLNG

SEQ ID NO: 21993 - protein, 606 aa, Streptococcus agalactiae
ATGATAAAGTTTAAATTATTTTTTAAATCCACAGAAAAAGAGGAAGAATGGATCGATAAGGTTCAAAAAAGTGGCTATACTTTTACAGGCATTAACTTATTTCTTCCAGCCTTCTATTATTTTAAGAGAGATAAAGAAAAAGACAAGATGTCAATAAAAATGGATTTTAAAAAATACATATCGAAAGATGACTATGCTAACTATATCACTTTATTTGAGGACAGTGGATGGAAGCATATTAGCGGTAGTCGTTGGGGAGGGCTGCATTATTTTCAAAAAATAAAGCCTGAAACCAGTTCAGAGATTTTTTCTGATCAAGAATCAAAATCAGCGATGGCTATGAGTTATTATAAATATACTTGTGAGCATGCGTTTTTCTCTTTATTTTATTTCTTTCTCTTGATAAGAACAACTTCTATCATCATATTTGATCCAAAAAGTTGGTATCTGACGCAAGGTCTATGGGAAATGCAAGGAAAAATATTTTGGTTAGCGTTCTTATTTGAAACACCATTTGCCTTATTAAGAATATTACCTATGTTTTACTTTTTAATTTCTGGAATATACTATATTACACGAGCTATAAAACCCAAGGAAATTATAAAT

SEQ ID NO: 21994 - protein, 202 aa, Streptococcus agalactiae
MIKFKLFFKSTEKEEEWIDKVQKSGYTFTGINLFLPAFYYFKRDKEKDKMSIKMDFKKYISKDDYANYITLFEDSGWKHISGSRWGGLHYFQKIKPETSSEIFSDQESKSAMAMSYYKYTCEHAFFSLFYFFLLIRTTSIIIFDPKSWYLTQGLWEMQGKIFWLAFLFETPFALLRILPMFYFLISGIYYITRAIKPKEIIN

SEQ ID NO: 21995 - protein, 333 aa, Streptococcus agalactiae
ATGAAAAGGAATAAACATTTACCGTTAACAGAAACTACCTATTATATTTTATTAGCTTTGTTTGAGGAAGCGCATGGCTATGCTATTATGCAAAAAGTTGAAGAAATGAGTGGCGGTGATGTTAGAATAGCCGCAGGGACAATGTACGGTGCCATTGAAAATTTACTTAAACAAAAATGGATAAAGTCTATCCCAAGTGACGATAGAAGAAGAAAAGTTTATATTATTACTGAGACAGGAAAAGAAATAGTAGAACTTGAAACGAATCGATTAAGAAAGTTACTTAATACTGCTAATCAGTTGGGTTTTGGGGGAGATAGTTATGATAAAGTT

SEQ ID NO: 21996 - protein, 111 aa, Streptococcus agalactiae; identical to SEQ ID NO: 3660

SEQ ID NO: 21997 - protein, 591 aa, Streptococcus agalactiae
TTGCTGCTATTTGACTTATCTAGATCAATATTTCCAACTAATATGATATCCTATGCATACCTCATTGCAGAAATATACTTTAAAGTCAAAATAAGGAAATATATTATGGTAATTAAAGAATACGAGAATAATCCGTACCATTTAGCACAGCTAGTAGATTTAATTAATTATTGTCAGAATATAGAAGCTAAACTTGATATAAAGATGGCTGAACAAGACGATATTTTTCAAATAGAAAATTATTATCAAAACAGAAAAGGTCAATTTTGGCTTGCCTTAGAAAATGAAAAAGTAGTTGGTTCGATTGCGTTACTGCGTATTGATGATAAAACAGCTGTTCTAAAAAAATTTTTTACATATCCAAAATATAGAGGAAATCCTGTTCGACTTGGTCGAAAATTATTTGAAAGATTTATGCTTTTTGCTCGAGCTAGTAAATTCACAAGAATTGTCTTGGATACTCCAGAAAAAGAGAAAAGATCTCACTTCTTTTATGAAAATCAAGGATTTAAGCAAATAACAAGAGATAAACTAGATGTAGACTACATTTTTCCAGATAGAGATTCAAGGATATATGTAAAACTTCTTGAT

SEQ ID NO: 21998 - protein, 197 aa, Streptococcus agalactiae
MLLFDLSRSIFPTNMISYAYLIAEIYFKVKIRKYIMVIKEYENNPYHLAQLVDLINYCQNIEAKLDIKMAEQDDIFQIENYYQNRKGQFWLALENEKVVGSIALLRIDDKTAVLKKFFTYPKYRGNPVRLGRKLFERFMLFARASKFTRIVLDTPEKEKRSHFFYENQGFKQITRDKLDVDYIFPDRDSRIYVKLLD

SEQ ID NO: 21999 - protein, 741 aa, Streptococcus agalactiae
ATGTTAAAAAAAGAATGGATGGAGAATGTTAGGACATACAAAGTTATATCTATTCTGATTACTTGTTCAATATTTGGTATATTAGGTCCCTTAACTGCACTTATGATGCCTGATATTATGGCAGGAATTTTACCTAAAAAACTACAGGGAGCGATACCAGAGCCTACCTATATTGATTCTTATATTCAGTATTTTAAAAATATGAATCAGCTTGGTTTAGTTATTTTAGTATTTTTATTTAGTAGTACACTGACGCAAGAATTTTCAAAAGGAACCTTAATTAATCTAGTTACGAAGGGATTAGCCAAAAAAGTTATAATCCTTGCTAAATTTATAGTAATTACCCTTCTATGGACAGTGTCATACTTATTAAGTGTTGTCATCCATTTTAGTTATACGTTATATTACTTTAGTAACGAAGGAAGTCATAAATTAATGGTTTACGGTGCAACATGGTTTATCGGTATTCTTTTCATAAGCTTAATACTCTTTTTTTCAGTTCTTTTTCGTAAAACTTTAGGGGTTTTGTTAGGTTGTCTTTTTATGGTGGTGTTATGTGTAGTATCTGGATTTTTTAAAATCAGTAAAAGCTATAATCCTATGCTTCTTATCCAAAAACAAGGAGAAATGTTAAGTGGAAAGTTTAAAGTTCAAGACTTAATGGAACCGAGCATATTAGTGTTTTTGCTTATTATAATGACGTTATTACTTAGCATGTACATTTTTGAAAAAAGTGAAGTT

SEQ ID NO: 22000 - protein, 247 aa, Streptococcus agalactiae
MLKKEWMENVRTYKVISILITCSIFGILGPLTALMMPDIMAGILPKKLQGAIPEPTYIDSYIQYFKNMNQLGLVILVFLFSSTLTQEFSKGTLINLVTKGLAKKVIILAKFIVITLLWTVSYLLSVVIHFSYTLYYFSNEGSHKLMVYGATWFIGILFISLILFFSVLFRKTLGVLLGCLFMVVLCVVSGFFKISKSYNPMLLIQKQGEMLSGKFKVQDLMEPSILVFLLIIMTLLLSMYIFEKSEV

SEQ ID NO: 22001 - protein, 813 aa, Streptococcus agalactiae
ATGATTTATGGATTCGTAGGACCAAATGGAGCAGGTAAAACAACGACAATAAAAATGATTTTAGGATTGTTAAAATTCGATACGGGTTTCATAACAATTTTTGGTAAAAAAGTTAATTTTGGAAGAACAGATACCAATCAACTGATTGGCTATCTCCCAGATGTTCCCGAGTACTACGATTATATGACAGCTCTAGAATATCTTGATTTATGTTCTGGTTTAGCGAGATCAAAGCATAAGCTTTCTAACAAAGAACTACTTAGGTCAGTTGGACTTGACGATAATCACCAAAAGATTGCTACTTATTCTCGAGGAATGAAACAGCGTCTTGGATTAGCCCAAGCACTGGTCCATGATCCTAAAATTATTATTTGCGATGAACCAACCTCTGCATTAGACCCGAAAGGTCGCCAAGATATTTTAGATATTATTTCAAATCTTAGAGGAGAAAAAACTGTGATTTTTTCTACCCATATTCTCTCTGATGTCGAAAAAATATGTGATCACGTTCTGGTGTTAACTAAGTGTGGGATTTATTCTCTTGAAGAGTTAAAAGGAAAAAAATCAGAGGAAAATTATTCGGTTCGTATTTTAATAAAAGTGACAAAGTCTGAAGCTAAGGTACTATCTCATAACTATCAGATAGAAAAGAAAGATAATGAGTATGCACTGACTCTCAAAGGCTCTAAAATGGATAACAAAGCAGATTTACTAGCTGGTTTTTACCAAGATTTAGTTTCTTTAAAGATTAGCCCATCAGCTATTGAAGTCATTGACAATAGTTTAGAGGAGCTTTATTTGGAGGTTACCAAA

SEQ ID NO: 22002 - protein, 271 aa, Streptococcus agalactiae; identical to SEQ ID NO: 3666

SEQ ID NO: 22003 - protein, 204 aa, Streptococcus agalactiae
ATGAATACAGAAATACCAAATCAATTATTACCATTCCTAGTTCCGTTGATTATGTTGCAAGGAGCTTTAATTATCATTTCTCTAGTCAAACTAAGTAAACTTAAGATGACTAAACACCTTTCAAAGCCAGTTTGGTTTTTGGTCATTATATTTCTTAATATAATTGGGTCAATTGCATTTCTTATTTTGGAAGGGAATAATGAA

SEQ ID NO: 22004 - protein, 68 aa, Streptococcus agalactiae
MNTEIPNQLLPFLVPLIMLQGALIIISLVKLSKLKMTKHLSKPVWFLVIIFLNIIGSIAFLILEGNNE

SEQ ID NO: 22005 - protein, 1032 aa, Streptococcus agalactiae
ATGACGCAAGAGAATTTGAGTGATTATCTGCATTTAACAAAAACTACAATTTCAAAGTGGGAAAATAATCAAGCTAAACCGGATATTGACTATCTTATTTTGATGGCTAATCTTTTTGATATTAGCTTGGATGACTTAGTCGGTTATCAAAAAACATTGTCAGATGATCAAAGAAATCAGCTCATTAAGGATCTAAAAATAAAAGCAAATGTATTGTCTGAGAGAGATTTCTTTCAGGAAGTTAAGGAATTATCAAAACAGTTCCCTAACGATTTTAAGACTCTGTTGATAATGATTAATATGGTCTTGAGCAACCTAACCAACCTTAATGATTCAGAAATGAAAGAGTGGTCACTAAGTACACTAAATAAAATTATTAGTAAAACAGTAGTTGAGTCTGACCTCCAGACGGCGATAATGTTCAAAACGGTCGTTCTTTTTCACAACCTTGAATATGATGAAGTGATAAACCTTTACCAGAATAGTCCCTATAAATTAGGTGAAGAATTACTTTTAGCTAATAGCTTTTTTGCAAAAGGCGATGTTTACCGAGCTAAGCAAGTATTACAGGTTGAAATTTATCAGCAGATTCTACTTGTATGCGAGTATCTATTGAGTTTATCAACTTTTGAAGTTGAAGAAAACAAAGGCGATATTTTTGAAAGGCTTGAACATATGATAGAAGCGTTTCAATTAAACTCTTTGCATCCCAACACAGTCATCAAGTGTTATTATAGTTTAGCTTGTCATTATAGTAAAAGTGATGATGATAAGGCATTAGGATACTTAAAACAATGTTTTAAATCTTTAAAACAATTGCTCCAAAGATTTGAATTACACGGTGATACTTTCTTTTATACCATCGATGATTGGTTAGAGACAATACCTACTGGTATTGCACCACCGACGAGTCAATTACAGGTAATAGAACGAGTTGAGGACTTATTTCAAAATTCACAATTTAAAGAACTATCAGGGCGTAAAGAATTTCAACAAATGATTCAAAAACTTAACGATTTAAAAAAGGATTAC

SEQ ID NO: 22006 - protein, 344 aa, Streptococcus agalactiae
MTQENLSDYLHLTKTTISKWENNQAKPDIDYLILMANLFDISLDDLVGYQKTLSDDQRNQLIKDLKIKANVLSERDFFQEVKELSKQFPNDFKTLLIMINMVLSNLTNLNDSEMKEWSLSTLNKIISKTVVESDLQTAIMFKTVVLFHNLEYDEVINLYQNSPYKLGEELLLANSFFAKGDVYRAKQVLQVEIYQQILLVCEYLLSLSTFEVEENKGDIFERLEHMIEAFQLNSLHPNTVIKCYYSLACHYSKSDDDKALGYLKQCFKSLKQLLQRFELHGDTFFYTIDDWLETIPTGIAPPTSQLQVIERVEDLFQNSQFKELSGRKEFQQMIQKLNDLKKDY

SEQ ID NO: 22007 - protein, 612 aa, Streptococcus agalactiae
GTGAACAAGAAATCCTTTTTCCAGTGTGTTATACTATTTGTTTCTTTTTTAGTGTTAACATTAGCAGTTGAATCTCAAAGTGATATGATAAGTTATTTGGATAATATCACTTCAGCTTTTTTTCAAAGCATACGAAACCCCGATTTAACTAACTTAATGACGATAATATCAACAGTTGTCAGCCCTTTGACAACGTCATTAATAGCACTTGTTATCCTTGGGTATCAATATTTTTTAAACCAAAGAATAGCTGTGTGGCTATTTATGTTATTTTTTGGTACCAATGCTTTAGCATTGCTTTTAAAAGATATCATCGCACGTCATAGACCTATGAATCAACTTATTTTTGACTCGGGTTATAGTTTTCCCAGTGGACATACGATATCAACATTTTTATTAATGATTCTTGTTTTAGTGGTTGCGAGACAGAGATTGAGAAGAGTATTGTCACAAGTAGTTTTCGTAATATTTGCATTAGTGATCCTTGCATCAGTTATTTTTTCAAGGCTCTATTTAGAAAATCATTTTTTAACGGATATTTTAGGGTCGTTGTTACTAGGAGCATCGTCATATTGTGGTTTGTCTGCTATTGTATCTTTGAAAGAGTTACAA

SEQ ID NO: 22008 - protein, 204 aa, Streptococcus agalactiae
MNKKSFFQCVILFVSFLVLTLAVESQSDMISYLDNITSAFFQSIRNPDLTNLMTIISTVVSPLTTSLIALVILGYQYFLNQRIAVWLFMLFFGTNALALLLKDIIARHRPMNQLIFDSGYSFPSGHTISTFLLMILVLVVARQRLRRVLSQVVFVIFALVILASVIFSRLYLENHFLTDILGSLLLGASSYCGLSAIVSLKELQ

SEQ ID NO: 22009 - protein, 315 aa, Streptococcus agalactiae; identical to SEQ ID NO: 12583

SEQ ID NO: 22010 - protein, 105 aa, Streptococcus agalactiae; identical to SEQ ID NO: 12584

SEQ ID NO: 22011 - protein, 558 aa, Streptococcus agalactiae
ATGAGAATAACTATTTTTTGTGGAGCAAGTACTGGGGAAAATCCTGTTTATAGTGAAAAAACAGTTTCCTTGGCACAATGGATGGCACAAAACAAACATTCTCTGGTGTATGGTGGAGGAAAAGTTGGATTAATGGGAGTCATGGCTGATACTGTGATTGCAAATGGTGGCTATACTACTGGTGTTATTCCGACATTTTTAAGAGATCGTGAAATTGCACATGAAAATTTATCAGAGCTTATCATAGTAAATAATATGCCTGAACGTAAGGCAAAAATGATGCTACTTGGAGATGCCTTTATCGCTCTACCTGGTGGACCTGGTACTCTTGAAGAAATTTCCGAAGTTATCTCTTGGTCTCGCATTGGTCAAAATGATAATCCTTGCATTTTATATAATGTTAATGGCTACTTTAATGATTTAAAAAATATGTTTGATCATATGGTTGGTGAGGGTTTTCTTAGTCTGGAAGATAGAGAAAATGTCCTATTCTCAGATGATATTGCTGAAATCGAAGATTTTATAACGAATTATAAAGTCCCTAGCACGCGCCAATAC

SEQ ID NO: 22012 - protein, 186 aa, Streptococcus agalactiae
MRITIFCGASTGENPVYSEKTVSLAQWMAQNKHSLVYGGGKVGLMGVMADTVIANGGYTTGVIPTFLRDREIAHENLSELIIVNNMPERKAKMMLLGDAFIALPGGPGTLEEISEVISWSRIGQNDNPCILYNVNGYFNDLKNMFDHMVGEGFLSLEDRENVLFSDDIAEIEDFITNYKVPSTRQY

SEQ ID NO: 22013 - protein, 457 aa, Streptococcus agalactiae
TTGAATCAAGAAAAAAAGAGACTTAACCTAATCGGGCTGATACTTTTAGCTCAGGCTATTGTTTTAAGTTTGGCGACTACACTATTTGCTGAAATCTTACAAAATGATGTCTGGATAGGTATAGCAAGTACTTTAATCGCCTTACTCATTCCTTGTTTTTTTATGGGTTTTAAAAATTTAAAAAAACATCTAACGGCACTCATCATACAATCACTTTCACCACTATTTTTCTTTAAGCATTATATATACTACTAATAATATAGTCTCCACAATATGGGATGCTGTGCTAAATCATCTCAATATAGGAATCGGAAAGTCAAAATTAGAGCCACCTTCAGTATACTTATGATTAGTTATTCTGTTGTTGTAGGTCCTTTTTGAAAAGTTTATCCGAGAATAGTATGATTTATTATCCAAGTATGTAAATGTTTGCATTATATTCTGGCATCCTATTTTT

SEQ ID NO: 22014 - protein, 160 aa, Streptococcus agalactiae
  VARIANT 67, 130: Xaa = Any Amino Acid
MNQEKKRLNLIGLILLAQAIVLSLATTLFAEILQNDVWIGIASTLIALLIPCFFMGFKNLKKHLTAXHHTITFTTILFLLSIIYTTNNIVSTIWDAVLNHLNIMESESQNYDATFSILMISYSVVVGPFXEEVLYRGIVLNLLSKYGKWFAIITSGILFV

SEQ ID NO: 22015 - protein, 300 aa, Streptococcus agalactiae; identical to SEQ ID NO: 12589

SEQ ID NO: 22016 - protein, 100 aa, Streptococcus agalactiae; identical to SEQ ID NO: 12590

SEQ ID NO: 22017 - protein, 765 aa, Streptococcus agalactiae
ATGAACGTTAAACATATGATGTATCTATCTGGAACTCTAGTGGCTGGTGCATTGTTATTTTCACCAGCTGTATTAGAAGTACATGCTGATCAAGTGACAACTCCACAAGTGGTAAATCATGTAAATAGTAATAATCAAGCCCAGCAAATGGCTCAAAAGCTTGATCAAGATAGCATTCAGTTGAGAAATATCAAAGATAATGTTCAGGGAACAGATTATGAAAAACCGGTTAATGAGGCTATTACTAGTGTTGAAAAATTAAAGACTTCATTGCGTGCCAACCCTGAGACAGTTTATGATTTGAATTCTATTGGTAGTCGTGTAGAAGCCTTAACAGATGTGATTGAAGCAATCACTTTTTCAACTCAACATTTAGCAAATAAGGTTAGTCAAGCAAATATTGATATGGGATTTGGGATAACTAAGCTAGTTATTCGCATTTTAGATCCATTTGCTTCAGTTGATTCAATTAAAGCTCAAGTTAACGATGTAAAGGCATTAGAACAAAAGGTTTTAACTTATCCTGATTTAAAACCAACTGATAGAGCTACCATCTATACAAAATCAAAACTTGATAAGGAAATCTGGAATACACGCTTTACTAGAGATAAAAAAGTACTTAACGTCAAAGAATTTAAAGTTTACAATACTTTAAATAAAGCAATCACACATGCTGTTGGAGTTCAGTTGAATCCAAATGTTACGGTACAACAAGTTGATCAAGAGATTGTAACATTACAAGCAGCACTTCAAACAGCATTAAAA

SEQ ID NO: 22018 - protein, 255 aa, Streptococcus agalactiae
MNVKHMMYLSGTLVAGALLFSPAVLEVHADQVTTPQVVNHVNSNNQAQQMAQKLDQDSIQLRNIKDNVQGTDYEKPVNEAITSVEKLKTSLRANPETVYDLNSIGSRVEALTDVIEAITFSTQHLANKVSQANIDMGFGITKLVIRILDPFASVDSIKAQVNDVKALEQKVLTYPDLKPTDRATIYTKSKLDKEIWNTRFTRDKKVLNVKEFKVYNTLNKAITHAVGVQLNPNVTVQQVDQEIVTLQAALQTALK

SEQ ID NO: 22019 - protein, 636 aa, Streptococcus agalactiae
ATGGAGAATGTTAGGACATACAAAGTTATATCTATTCTGATTACTTGTTCAATATTTGGTATATTAGGTCCCTTAACTGCACTTATGATGCCTGATATTATGGCAGGAATTTTACCTAAAAAACTACAGGGAGCGATACCAGAGCCTACCTATATTGATTCTTATATTCAGTATTTTAAAAATATGAATCAGCTTGGTTTAGTTATTTTAGTATTTTTATTTAGTAGTACACTGACGCAAGAATTTTCAAAAGGAACCTTAATTAATCTAGTTACGAAGGGATTAGCCAAAAAAGTTATAATCCTTGCTAAATTTATAGTAATTACCCTTCTATGGACAGTGTCATACTTATTAAGTGTTGTCATCCATTTTAGTTATACGTTATATTACTTTAGTAACGAAGGAAGTCATAAATTAATGGTTTACGGTGCAACATGGTTTATCGGTATTCTTTTCATAAGCTTAATACTCTTTTTTTCAGTTCTTTTTCGTAAAACTTTAGGGGTTTTGTTAGGTTGTCTTTTTATGGTGGGTGTATGTGTAGTATCTGGATTTTTTAAATCAGTAAAGCTATATCCTATGCTTCTTATCCAAAACAAGGGAGAAAATGTAGTGGAAAGTTTAAAAAGTCAGACT

SEQ ID NO: 22020 - protein, 212 aa, Streptococcus agalactiae
MENVRTYKVISILITCSIFGILGPLTALMMPDIMAGILPKKLQGAIPEPTYIDSYIQYFKNMNQLGLVILVFLFSSTLTQEFSKGTLINLVTKGLAKKVIILAKFIVITLLWTVSYLLSVVIHFSYTLYYFSNEGSHKLMVYGATWFIGILFISLILFFSVLFRKTLGVLLGCLFMVGVCVVSGFFKSVKLYPMLLIQNKGENVVESLKSQT

SEQ ID NO: 22021 - protein, 1083 aa, Streptococcus agalactiae
ATGACAACAAATGTAATGGCAAATTATAGCTACGGAGAAGATTGCTTCAAAGAAATTCCTAGCGTTTTGGCAACTTACCGTATTCAAAGCATTGCTTTCGTCGGTGGCAAACGTGCCCTAGACAGCTCAGAAGCCGAGGTTCGCTCTATTTTAGAGGAAGCAAATATTAAAGTCACAGGAAGCTTTGTCTATGGAACGGATTCAACACAATCTAACATTGACAAGTTAGTAGCCAACCCACAAGTTCAAGCTGCTGATGCTATCTTAGGTTTTGGCGGTGGAAAAGCTTTAGACACAGCTAAAATGGTAGCAAAAGAGTTAGGTAAAAATAGCTTTACTATCCCAACTATTTGTTCTAATTGCTCCGCAGGTACTGCCATTGCAGTTGTATATAATGATGACCATTCTTTCTTAAGATACGGCTATCCCGAGTCTCCACTTCATATTTTTATCAATACACGGATCATTGCACAGGCACCAAGCAAATATTTTTGGGCTGGTATTGGGGACGGTATTTCAAAAGCCCCTGAAGTAGAACGTGCTACCTTAGAGGCTAAGACCAATAAACTACCACATACTGCAGTGTTAGGACAAGCAGTCGCTCTGTCTTCAAAGGAAGCTTTTTATCAATTTGGTGAACAAGGTCTAAAAGACGTTGAAGCTAATTTAGCTTCGCGTGCAGTTGAAGAAATTGCGCTTGATATCTTAATCTCAACTGGCTATGCTTCTAATTTAGTTAATCAACCTGATTTCTACTACAATTCTTGTCACGCGCATGCATTTTACTATGGTACAACCGCTATTCAAAGACAAGGTGAATTCTTACATGGCGTTGTAGTTGCGTTTGGTGTGTTAGTTTTACATGCTTATTTCAACGAACTAGAAGAACTTGAAAAAGTAGCTCGTTTTAATAAGTCACTAGGTTTGCCAACAACTCTAGCTGACGTCTCTTTATCAGAAAAAGATATTCCAAAAATTGTTGAAATTGCAATGACTACTAATGAATACAAAAATACCCCTTTCGATCCCAAAATGTTTGCTCAAGCTATTTTAGCAGCAGACGCTTTCGGACAGACACTAGCC

SEQ ID NO: 22022 - protein, 361 aa, Streptococcus agalactiae; identical to SEQ ID NO: 3688

SEQ ID NO: 22023 - protein, 705 aa, Streptococcus agalactiae; identical to SEQ ID NO: 12597

SEQ ID NO: 22024 - protein, 235 aa, Streptococcus agalactiae; identical to SEQ ID NO: 3690

SEQ ID NO: 22025 - protein, 1842 aa, Streptococcus agalactiae; identical to SEQ ID NO: 12599

SEQ ID NO: 22026 - protein, 614 aa, Streptococcus agalactiae; identical to SEQ ID NO: 12600

SEQ ID NO: 22027 - protein, 2235 aa, Streptococcus agalactiae; identical to SEQ ID NO: 12601

SEQ ID NO: 22028 - protein, 745 aa, Streptococcus agalactiae; identical to SEQ ID NO: 12602

SEQ ID NO: 22029 - protein, 321 aa, Streptococcus agalactiae; identical to SEQ ID NO: 12603

SEQ ID NO: 22030 - protein, 107 aa, Streptococcus agalactiae; identical to SEQ ID NO: 12604

SEQ ID NO: 22031 - protein, 249 aa, Streptococcus agalactiae; identical to SEQ ID NO: 12605

SEQ ID NO: 22032 - protein, 83 aa, Streptococcus agalactiae; identical to SEQ ID NO: 12606

SEQ ID NO: 22033 - protein, 690 aa, Streptococcus agalactiae; identical to SEQ ID NO: 12607

SEQ ID NO: 22034 - protein, 230 aa, Streptococcus agalactiae; identical to SEQ ID NO: 12608

SEQ ID NO: 22035 - protein, 4713 aa, Streptococcus agalactiae
ATGAACACAAAACAGCGTTTTTCAATCCGGAAATATAAGTTAGGTGCCGTATCTGTACTTTTGGGAACCCTATTTTTTTTAGGCGGTATCACAAATGTAGCTGCTGATTCTGTCATAAATAAGCCATCTGATATTGCAGTTGAACAGCAAGTAAAAGACAGTCCAACGAGCATAGCAAATGAGACACCTACTAACAACACGTCATCAGCCCTTGCGTCGACAGCTCAAGACAATCTTGTTACAAAGGCTAATAATAATAGTCCAACAGAAACACAACCAGTAGCTGAGTCTCACTCTCAAGCCACCGAGACATTTTCCCCAGCCGCAAATCAACCGGTTGAAAGCACTCAAGAAGTTTCTAAAACTCCTTTAACCAAACAAAATTTAGCAGTCAAACCTACACCAGCTATTTCTAAAGAAACCCCTCAAAACATTGATAGTAATAAAATTATCACTGTCCCCAAAGTATGGAACACAGGCTACAAAGGAGAGGGAACTGTTGTAGCAATTATTGACTCAGGACTAGATACCAATCACGATGCTCTCCAACTAAATGATTCGACAAAAGCAAAATACCAAAACGAACAGCAAATGAATGCTGCTAAAGCAAAAGCTGGTATAAACTATGGAAAATGGTATAACAACAAAGTAATCTTTGGTCACAACTATGTTGATGTCAATACAGAGCTAAAAGAGGTGAAAAGCACTTCTCATGGTATGCACGTAACCAGTATCGCAACAGCTAATCCTAGCAAGAAAGATACAAATGAATTAATCTATGGTGTTGCTCCTGAAGCACAAGTAATGTTTATGAGAGTCTTCTCTGATGAAAAAAGAGGAACTGGACCAGCCCTTTATGTTAAAGCTATTGAAGATGCCGTTAAACTCGGTGCTGATAGCATTAATTTAAGTTTAGGTGGAGCTAATGGCTCTTTAGTTAATGCCGATGACCGACTTATAAAAGCTTTAGAGATGGCTAGACTCGCTGGCGTTTCTGTTGTTATAGCAGCAGGTAACGACGGTACATTTGGGAGTGGAGCATCAAAGCCTTCTGCTCTTTATCCTGATTATGGTTTAATTGGTAGTCCATCAACAGCTCGTGAGGCCATTTCTGTAGCATCATATAATAATACAACACTGGTTAATAAAGTCTTTAACATTATCGGATTAGAAAACAACAAAAATCTCAACAACGGATTAGCTGCTTATGCAGATCCTAAAGTTAGTGATAAGACCTTTGAAGTAGGGAAGCAATATGATTATGTTTTCGTAGGAAAAGGAAACGACAATGATTATAAGGACAAAACTTTAAATGGTAAAATCGCCTTAATTGAACGTGGAGATATTACTTTTACAAAAAAAGTCGTCAATGCTATTAATCACGGTGCTGTGGGAGCTATTATCTTTAATAACAAAGCTGGGGAAGCTAACCTAACAATGAGTTTAGATCCTGAAGCAAGTACTATTCCTGCCATTTTTACCCAAAAAGAGTTTGGAGATGTTTTAGCTCAAAAAAGCTATAAAATTGTATTTAACAATATCAAAAATAAACAAGCTAACCCTAATGCAGGTGTCCTATCTGACTTTTCAAGCTGGGGATTAACAGCAGACGGACAATTAAAACCTGACTTATCTGCTCCTGGAGGCTCTATTTACGCCGCTATCAATGATAATGAATATGATATGATGAGTGGGACAAGTATGGCTTCTCCCCATGTCGCTGGTGCTACTGCTCTAGTTAAACAATACTTATTGAAAGAACATCCAGAACTTAAAAAAGGTGACATTGAAAGAACTGTCAAATACCTTCTTATGAGTACTGCTAAAGCACACCTAAACAAAGATACAGGCGCTTACACCTCACCACGCCAACAAGGAGCAGGTATTATCGATGTCGCAGCAGCAGTTCAGACAGGATTATACCTAACTGGTGGGGAAAACAACTATGGTAGCGTTACATTAGGAAATATTAAAGATAAAATTTCCTTTGATGTTACTGTTCATAATATCAATAAAGTTGCAAAAGATTTACACTATACAACCTATTTGAATACTGATCAAGTTAAAGATGGCTTTGTCACATTGGCTCCTCAACAACTTGGTACATTTACAGGGAAAACGATACGGATTGAACCAGGGCAAACTAAAACGATTACAATTGATATAGATGTTTCGAAATACCATGACATGTTAAAAAAAGTAATGCCAAACGGCTATTTCCTAGAAGGCTACGTACGTTTTACAGACCCTGTTGATGGTGGGGAAGTTCTTAGTATTCCTTATGTTGGATTTAAGGGAGAATTCCAAAACTTAGAAGTTTTAGAAAAATCCATTTATAAGCTTGTTGCTAACAAAGAAAAGGGATTTTATTTCCAACCAAAACAAACAAACGAAGTTCCTGGTTCAGAAGATTATACTGCCTTAATGACTACAAGTTCAGAACCTATCTACTCAACAGACGGTACTAGTCCTATCCAATTGAAAGCCTTGGGAAGCTATAAGTCTATAGATGGAAAATGGATCTTACAACTAGATCAAAAAGGCCAGCCTCATCTAGCCATTTCACCTAATGATGACCAAAATCAAGATGCCGTTGCAGTGAAAGGTGTTTTCTTACGTAATTTCAATAATTTAAGAGCCAAAGTCTATCGTGCAGATGATGTTAATTTACAAAAACCACTATGGGTAAGTGCTCCCCAAGCAGGAGATAAAAATTACTACAGCGGAAATACTGAAAATCCAAAATCTACATTTTTATATGACACAGAATGGAAAGGAACCACTACTGATGGTATTCCTTTAGAAGATGGAAAATACAAATACGTTTTAACTTATTACTCTGATGTCCCTGGCTCTAAGCCACAACAAATGGTGTTTGATATCACTTTGGATAGACAAGCTCCTACACTAACAACAGCAACTTATGACAAAGATAGACGTATCTTCAAAGCTCGTCCTGCAGTAGAACACGGGGAATCTGATATCTTTAGAGAACAAGTTTTTTACTTAAAAAAAGATAAAGATGGTCATTATAATAGCGTCTTACGTCAAAAAGGAGAAGACGGTATCCTTGTTGAAGATAACAAAGTATTTATCAAACAAGAAAAGGATGGTAGCTTTATTCTACCTAAAGAGGTTAACGATTTCTCTCATGTCTACTACACTGTTGAAGATTATGCAGGCAATCTAGTATCAGCAAAACTCGAAGATTTGATCAATATTGGCAATAAAAATGGTTTAGTAAACGTCAAAGTGTTTAGCCCTGAGCTTAACAGTAATGTCGATATTGATTTCTCTTACTCTGTCAAAGATGACAAAGGTAATGTCATCAAAAAGCAACATCACGGGAAAGACCTCAATTTACTGAAATTGCCTTTTGGTACCTATACGTTTGATCTATTCTTATACGATGAGGAACGAGCAAATCTAATCAGTCCCAAAAGTGTCACTGTAACTATTTCTGAAAAAGATAGCCTTAAAGACGTCTTATTTAAAGTTAACTTACTCAAGAAAGCAGCCTTACTCGTTGAATTTGACAAGCTTTTACCAAAAGGAGCAACAGTCCAGTTGGTTACTAAGACAAATACTGTTGTTGATCTACCAAAAGCAACTTATTCTCCTACTGACTATGGTAAAAACATACCTGTAGGAGACTATCGTTTAAACGTAACTCTGCCTAGTGGGTATAGCACTTTAGAGAACTTAGATGATTTACTTGTATCCGTAAAAGAAGGTCAAGTAAACCTAACAAAATTGACGCTGATTAATAAAGCTCCTCTGATTAATGCCCTAGCAGAACAAACTGACATTATTACCCAACCTGTGTTTTATAATGCTGGAACTCACTTAAAAAATAATTACCTAGCTAATCTTGAAAAGGCACAAACTTTAATTAAAAATAGAGTGGAACAAACAAGTATTGATAATGCTATTGCTGCTTTGAGAGAAAGTCGCCAAGCTCTTAACGGTAAAGAAACAGATACTTCTTTACTGGCAAAAGCTATTTTAGCTGAAACAGAAATCAAGGGAAACTATCAATTTGTTAATGCTAGTCCATTAAGCCAATCAACTTATATCAATCAAGTCCAATTGGCGAAAAACCTTCTACAAAAACCTAACGTCACTCAATCAGAAGTAGACAAAGCCTTAGAAAATCTTGATATTGCTAAAAATCAATTAAATGGTCATGAAACTGATTACTCTGGTTTACACCATATGATAATTAAAGCAAATGTTCTGAAACAAACATCATCTAAATATCAGAACGCCAGTCAATTTGCTAAAGAAAATTATAATAACCTTATCAAGAAAGCAGAATTGCTGCTTTCCAATAGACAAGCTACACAAGCTCAAGTTGAAGAGTTATTAAACCAAATAAAAGCAACCGAACAAGAGCTTGATGGTCGCGATAGAGTTTCTTCCGCAGAGAATTATAGTCAATCACTCAATGATAATGACTCTCTCAATACCACACCTATCAATCCGCCAAATCAGCCCCAGGCGTTGATATTCAAAAAAGGCATGACTAAAGAAAGTGAGGTTGCTCAGAAGCGTGTCTTAGGGGTGACTAGTCAAACCGATAATCAAAAGGTAAAGACAAACAAGCTTCCTAAAACAGGCGAAAGCACTCCTAAAATAACCTATACAATATTGCTATTTAGTCTCTCTATGCTAGGTCTGGCAACAATCAAACTAAAGTCTATCAAAAGAGAA

SEQ ID NO: 22036 - protein, 1571 aa, Streptococcus agalactiae; identical to SEQ ID NO: 12610

SEQ ID NO: 22037 - protein, 702 aa, Streptococcus agalactiae
ATGGGTATTGAGGTATACATGACAAAAATAATTTATTTCGCTGATGATGAAAAGAATATTCGTGACTTGGTGGTTCCTTTTTTAGAACATGATGGTTTCACTGTTCGAGCATTTGAAACTGGAGACCTTCTCTTAGAAGCCTATAAAAACCAAAAACCCGATTTAGTTATATTAGACATAATGATGCCTGGAACTAATGGTTTAGATGTTATGAAAAGCATCCGCCAATATGATAATGTTCCTATTATCATGTTAACAGCTAGAGATTCTGATGTTGATTTCATTACGGCTTTTAATTTAGGAACTGACGATTACTTCACCAAGCCTTTTTCACCTATAAAACTTAGCCTACATGTTAAAGCATTGTTCAAACGCCTTGATGAAAAAGCAATCAAAAATGACACTCAGTATCAGTTCCTAGATTTAACTCTGGATACTGAAAAGCGAATAGCCCTATTATCAAATGAAGAAATGCCCTTAACCAAGACAGAATTTGATTTTCTTTTAGTATTAATTGAAAAACCTGAAACTGCTTTTTCTAGGGAAACACTGCTTAATCGTATTTGGGGATTTGATGATATTGAAAGCAGAGCAGTTGATGACACTATTAAACGATTACGTAAAAAATTTAAGCAATACCACAGTCAAGTTAGTATCAAAACTGTCTGGGGTTACGGCTTCAAATTAATCAAAGAGGACAAA

SEQ ID NO: 22038 - protein, 234 aa, Streptococcus agalactiae
MGIEVYMTKIIYFADDEKNIRDLVVPFLEHDGFTVRAFETGDLLLEAYKNQKPDLVILDIMMPGTNGLDVMKSIRQYDNVPIIMLTARDSDVDFITAFNLGTDDYFTKPFSPIKLSLHVKALFKRLDEKAIKNDTQYQFLDLTLDTEKRIALLSNEEMPLTKTEFDFLLVLIEKPETAFSRETLLNRIWGFDDIESRAVDDTIKRLRKKFKQYHSQVSIKTVWGYGFKLIKEDK

SEQ ID NO: 22039 - protein, 1386 aa, Streptococcus agalactiae; identical to SEQ ID NO: 12613

SEQ ID NO: 22040 - protein, 462 aa, Streptococcus agalactiae; identical to SEQ ID NO: 12614

SEQ ID NO: 22041 - protein, 606 aa, Streptococcus agalactiae; identical to SEQ ID NO: 12615

SEQ ID NO: 22042 - protein, 202 aa, Streptococcus agalactiae; identical to SEQ ID NO: 12616

SEQ ID NO: 22043 - protein, 102 aa, Streptococcus agalactiae; identical to SEQ ID NO: 12617

SEQ ID NO: 22044 - protein, 34 aa, Streptococcus agalactiae; identical to SEQ ID NO: 12618

SEQ ID NO: 22045 - protein, 2499 aa, Streptococcus agalactiae
ATGACATTCTATAATCACAAAGAAATCGAACCCAAATGGCAAGCCTTTTGGGCAGATAATCATACTTTTAAAACAGGAACAGATGCATCAAAACCTAAGTTTTATGCCCTAGATATGTTCCCATACCCATCTGGAGCTGGTCTCCACGTTGGTCACCCAGAAGGCTATACAGCAACTGATATTCTCAGCCGTTTCAAACGTGCCCAAGGTCACAATGTCCTCCACCCAATGGGTTGGGATGCCTTTGGACTTCCTGCTGAGCAGTACGCTATGGATACTGGTAATGACCCAGCCGAGTTTACAGCTGAAAACATCGCTAACTTTAAGCGCCAGATTAACGCTCTTGGCTTCTCATACGACTGGGATCGCGAAGTCAACACAACTGACCCTAACTACTACAAGTGGACACAGTGGATCTTTACTAAGCTTTATGAAAAAGGCCTAGCCTATGAAGCTGAAGTTCCCGTTAACTGGGTTGAAGAATTGGGAACGGCCATCGCCAACGAAGAGGTTCTTCCAGATGGCACATCAGAACGTGGCGGCTACCCAGTTGTCAGAAAACCAATGCGCCAATGGATGCTCAAAATCACTGCCTATGCAGAGCGCTTGCTAGAAGACTTGGAAGAAGTTGACTGGCCAGAATCAATTAAGGACATGCAACGCAACTGGATTGGTAAATCAACTGGTGCCAATGTAACCTTCAAGGTTAAGGATACAGATAAGGACTTCACTGTCTTCACAACACGTCCTGACACCCTTTTTGGTGCAACTTACGCAGTTCTTGCTCCTGAACATGCCTTGGTTGATGCTATTACAACAGCTGACCAAGCAGAAGCTGTTGCCGAATACAAACGTCAAGCAAGTCTTAAATCAGATCTTGCCCGTACAGACCTTGCTAAAGAAAAAACAGGTGTCTGGACAGGTGCCTATGCTATTAACCCAGTTAATGGTAAAGAAATTCCAGTTTGGATTGCGGACTATGTCCTTGCCAGCTACGGTACAGGTGCTATCATGGCTGTTCCAGCCCACGATGAACGTGACTGGGAATTCGCAAAACAATTTAAGCTAGACATCATTCCAGTTCTTGAAGGTGGTAATGTTGAAGAGGCTGCCTTTACAGAAGACGGTCTTCACATCAACTCAGACTTCCTAGATGGTCTCGATAAAGCGTCAGCTATTGCCAAAATGGTCGAATGGCTTGAAGCAGAAGGTGTTGGTAATGAGAAAGTCACTTACCGTCTCCGCGACTGGCTCTTCAGCCGTCAACGTTACTGGGGTGAGCCAATCCCAATCATCCACTGGGAAGATGGGACATCAACAGCGGTTCCTGAGAGTGAATTGCCACTGGTTCTTCCAGTAACCAAGGATATCCGTCCTTCAGGTACTGGTGAGAGCCCACTTGCTAACTTGACAGACTGGTTGGAAGTGACTCGTGAAGATGGTGTTAAAGGTCGTCGTGAGACTAACACCATGCCACAATGGGCAGGTTCAAGCTGGTACTATCTCCGTTACATTGATCCACACAACACCGAAAAACTGGCTGATGAGGAACTTCTCAAACAATGGTTGCCAGTTGATATCTATGTCGGTGGTGCAGAGCATGCCGTGCTTCACCTTCTCTACGCTCGCTTCTGGCACAAGGTTCTTTACGATCTCGGTGTCGTACCTACCAAAGAGCCATTCCAAAAACTCTTTAACCAAGGGATGATTTTGGGAACAAGCTACCGCGACAGCCGTGGTGCACTTGTGGCAACTGACAAGGTTGAAAAACGTGATGGTAGCTTCTTCCATGTGGAAACTGGGGAAGAGCTTGAACAAGCACCAGCTAAGATGTCTAAATCACTTAAGAACGTTGTCAACCCAGATGATGTTGTTGAACAGTACGGTGCTGACACCCTTCGTGTTTACGAGATGTTCATGGGACCACTTGACGCTTCAATCGCTTGGTCTGAGGAAGGTCTTGAAGGCTCACGTAAGTTCTTGGACCGTGTTTACCGTTTGATCACGACTAAAGAGATTACTAAGGAAAATAGCGGAGCCCTTGACAAGGTTTACAACGAAACCGTTAAGGCTGTTACTGAGCAAGTTGACCAAATGAAATTCAACACAGCTATCGCTCAGCTCATGGTCTTTGTCAATGCAGCTAACAAGGAAGACAAACTCTTTAGCGACTATGCCAAAGGCTTTGTTCAATTGATTGCACCATTCGCACCACACTTAGGTGAGGAGCTCTGGCAAGTCTTGACAGCCTCAGGTGAGTCAATCTCTTACGTGCCATGGCCAAGCTATGACGAAAGTAAATTGGTTGAAAACGAAATTGAAATCGTTGTCCAAATCAAAGGTAAGGTCAAAGCTAAACTTGTAGTTGCTAAAGACCTTTCACGCGAAGAATTACAAGATCTTGCCCTTGCTAACGAAAAAGTCCAATCCGAAATCGCTGGCAAAGACATCATCAAAGTCATCGCAGTACCAAACAAACTGGTTAATATTGTGGTGAAA

SEQ ID NO: 22046 - protein, 833 aa, Streptococcus agalactiae
MTFYNHKEIEPKWQAFWADNHTFKTGTDASKPKFYALDMFPYPSGAGLHVGHPEGYTATDILSRFKRAQGHNVLHPMGWDAFGLPAEQYAMDTGNDPAEFTAENIANFKRQINALGFSYDWDREVNTTDPNYYKWTQWIFTKLYEKGLAYEAEVPVNWVEELGTAIANEEVLPDGTSERGGYPVVRKPMRQWMLKITAYAERLLEDLEEVDWPESIKDMQRNWIGKSTGANVTFKVKDTDKDFTVFTTRPDTLFGATYAVLAPEHALVDAITTADQAEAVAEYKRQASLKSDLARTDLAKEKTGVWTGAYAINPVNGKEIPVWIADYVLASYGTGAIMAVPAHDERDWEFAKQFKLDIIPVLEGGNVEEAAFTEDGLHINSDFLDGLDKASAIAKMVEWLEAEGVGNEKVTYRLRDWLFSRQRYWGEPIPIIHWEDGTSTAVPESELPLVLPVTKDIRPSGTGESPLANLTDWLEVTREDGVKGRRETNTMPQWAGSSWYYLRYIDPHNTEKLADEELLKQWLPVDIYVGGAEHAVLHLLYARFWHKVLYDLGVVPTKEPFQKLFNQGMILGTSYRDSRGALVATDKVEKRDGSFFHVETGEELEQAPAKMSKSLKNVVNPDDVVEQYGADTLRVYEMFMGPLDASIAWSEEGLEGSRKFLDRVYRLITTKEITKENSGALDKVYNETVKAVTEQVDQMKFNTAIAQLMVFVNAANKEDKLFSDYAKGFVQLIAPFAPHLGEELWQVLTASGESISYVPWPSYDESKLVENEIEIVVQIKGKVKAKLVVAKDLSREELQDLALANEKVQSEIAGKDIIKVIAVPNKLVNIVVK

SEQ ID NO: 22047 - protein, 1244 aa, Streptococcus agalactiae
ATGTCACCATTAAATATCAATAAGAATAATTGGCGCGCCCTAATCGCTGCCATTGTCGCATCCGGGACCGATGATTTAAATATCATGTTCCTTGCATTTTCTATGTCAACTATCATTACTGATCTTCATTTATCTGCGGCACAGGCTGGTTGGATTGGGACAATTACCAACTTGGGAATGCTCGTGGGAGGACTAATATTTGGTTTATTAGCTGATCGCTACAATAAATTTAAAGTTTTCAAATGGACGATTCTAATCTTTTCAATCGCAACTGGTTTAGTTTTCTTCACTACTAATTTATCATATCTCTATATCATGCGCTTCATTGCAGGAATTGGTGTTGGTGGCGAATATGGTATCGCTATTGCCATTATGGCAGGAATTGTCCCAGCTAATAAAATGGGCCGGATTTCTTCACTAAATGGTATAGCTGGTCAAGTTGGATCTATTAGCTCAGCACTCTTAGCAGGATGGCTAGCCCCAGCACTCGGTTGGCGGGGACTTTTTCTCTTTGGCCTTCTCCCTATAGTTCTCGTCCTATGGATGCAATTTGCTATTGATGATAAAGATATCTTAGATCAATATAATACAGACGCAGATGATGAACCTCTAGATATCAGTATAAAAGCTTTATTTGATACTCCTGTATTAGCCACACAGAGCCTAGCACTAATGGTTATGACAACTGTTCAGATTGCCGGATTCTTTGGCATGATGAACTGGTTACCAACTATTATCCAAACCAACTTAAACGTTTCTGTCAAGAATTCATCATTATGGATGATTGCAACCATTCTTGGAATGTGCCTTGGCATGCTAGTATTTGGTCAATTGTTAGATAAATTTGGACCGCGTTTAGTATACGGGTGTTTCCTTCTATCATCTGCAATTTGTGTCTATCTCTTTCAATTTGCAACAACAATGCCTTCTATGATTATAGGCGGGGCAGTTGTCGGATTCTTTGTTAATGGTATGTTTGCAGGCTATGGTGCCATGATTACACGTCTCTATCCACATCATATTCGTTCAACAGCTAACAATCTTATCTTAAATGTTGGTCGTGCAATAGGGGCTTTTCGTCTGTTATCATCGGAATGATTCTAGACGTTTCAAATGTCTCTATGGTCATGCTTTTCTTAGCAAGTCTCTATATCGTTAGTTTCTTATCAATGCTAAGCATTAAGCAATTAAAACATCAAAAATATCACACTAATTTAACACAATTAGATGTCAAACCAACTGAC

SEQ ID NO: 22048 - protein, 415 aa, Streptococcus agalactiae; identical to SEQ ID NO: 12624

SEQ ID NO: 22049 - protein, 807 aa, Streptococcus agalactiae
ATGAGAGGTCTTTATACTGCTGGAGTTTTAGATGCTTTTCTAGATGCAGGAATAAAAGTAGATGGTATCATATCTGTCTCTGCTGGTGCATTGTTTGGTGTTAATTTTGTATCTAGACAACGAGAGAGGGCTTTGCGATACAATAAAAAGTATTTATCCCACCCTAAATATATGAGTCTAAGGTCATGGCTTCGAACAGGGAATTTTGTTAATAAAGATTTCACCTATTATGAAGTTCCTATGAAATTGGATGTATTTGACGATGAAGCATTTAAAAAATCAAGTATTGATTTTTACGCAGTTGCTACAGAGATGACATCTGGTAAACCTGAGTATTTTAAAATTGATAGTGTTTTTGAACAAATGGAAATTTTACGTGCTAGTTCAGCATTACCAGTAGTCTCAAAGATGGTTGTTTGGCAGGGGAAAAAGTACTTAGATGGTGGTTTATCTGATAGTATTCCCGTTGATTTTGCCCGTGGTTTAGGATTTGACAAGTTGATTGTTGTGATGACTAGGCCGCTCAATTATCAGAAAAAGCCTTCAAGTGGACGATTGTATAAAACTCTGTATAGGAAATATCCTAATTTTGTAAAGACAGCCTCGAACCGGTACCAACAGTATAATAATAGCCTTGAAAAGGTCATGAGCCTTGAAAAAACAGGCGATCTATTTGCAATTAGACCAAGTAAGAGCTTGGTTATTGGCCGCTTAGAGAAGAATCCGGATAAACTTGATAGTATTTATCAGCTTGGTATGAAAGATGCTAAAAGTGGGATGCCTGAGCTGAATAGTTATCTAATGAAA

SEQ ID NO: 22050 - protein, 269 aa, Streptococcus agalactiae
MRGLYTAGVLDAFLDAGIKVDGIISVSAGALFGVNFVSRQRERALRYNKKYLSHPKYMSLRSWLRTGNFVNKDFTYYEVPMKLDVFDDEAFKKSSIDFYAVATEMTSGKPEYFKIDSVFEQMEILRASSALPVVSKMVVWQGKKYLDGGLSDSIPVDFARGLGFDKLIVVMTRPLNYQKKPSSGRLYKTLYRKYPNFVKTASNRYQQYNNSLEKVMSLEKTGDLFAIRPSKSLVIGRLEKNPDKLDSIYQLGMKDAKSGMPELNSYLMK

SEQ ID NO: 22051 - protein, 537 aa, Streptococcus agalactiae; identical to SEQ ID NO: 17431

SEQ ID NO: 22052 - protein, 179 aa, Streptococcus agalactiae; identical to SEQ ID NO: 3722

SEQ ID NO: 22053 - protein, 114 aa, Streptococcus agalactiae
TTGCGCCAGCAACAGCAACAGGTTTACTTAGATGATGCTGCTGCGGCCTTTAAAATTGCATCTTCATCTGTGAAAGATGAGACTCAAACTCATACACATANNNNNTTAATTAAT

SEQ ID NO: 22054 - protein, 38 aa, Streptococcus agalactiae
  VARIANT 34, 35: Xaa = Any Amino Acid
MRQQQQQVYLDDAAAAFKIASSSVKDETQTHTHXXLIN

SEQ ID NO: 22055 - protein, 522 aa, Streptococcus agalactiae
ATGGCAAATCGAATCTACCAGGCAGAAGAGAGCCAAAGAAACTTCTTTCAAAATGCCTCCCACGAGTTACGGACACCTTTAATGTCCATCCAAGGATATACTGAGGGAGTTCAAGAGGGTATTATTGATGCCGAGCTCGCACACTCTGTTATTCTGCAAGAGAGCAAAAAAATGAAACAGCTCGTAGACGATATTATCTTACTCTCTAAATTAGACAGTAACTTAAGTGATCAAAAAGATGAATTTTCTTTAAATGAATTACTTAATAGTATTATTGCTTATTTCAAACCCCTAGCTAATAAACAAAAAATTAGTATCACTTATAGACCAGACGAGCATGAAAAGTTACTAAAAGGTAACGAAGAGTTGATTCAACGAGCTATCAATAATATCCTTAGTAACGCACTACGCTATGCTGTTTCTCATATTGAAATCTCTTACACAAATCAAAAACTGACTATCTCAAACGACGGACCAGCCATTTCAAAAGAAGACTTACCTTATATTTTCGATCGCTTCTAT

SEQ ID NO: 22056 - protein, 174 aa, Streptococcus agalactiae
MANRIYQAEESQRNFFQNASHELRTPLMSIQGYTEGVQEGIIDAELAHSVILQESKKMKQLVDDIILLSKLDSNLSDQKDEFSLNELLNSIIAYFKPLANKQKISITYRPDEHEKLLKGNEELIQRAINNILSNALRYAVSHIEISYTNQKLTISNDGPAISKEDLPYIFDRFY

SEQ ID NO: 22057 - protein, 2397 aa, Streptococcus agalactiae
ATGAATAATAACGAAAAAAAAGTAAAATACTTTTTAAGAAAAACAGCTTATGGTTTGGCCTCAATGTCAGCAGCGTTTGCTGTATGTAGTGGTATTGTACACGCGGATACTAGTTCAGGAATATCGGATTCAATTCCTCATAAGAAACAAGTTAATTTAGGGGCGGTTACTCTGAAGAATTTGATTTCTAAATATCGTGGTAATGACAAAGCTATTGCTATACTTCTAAGTAGAGTAGATGATTTTAATAGAGCATCACAGGATACACTTCCACAATTAATTAATAGTACTGAAGCAGAAATTAACAATACTTTACCTCAGGGACGAATTATTAAACAGAGTATACCAGTCGTAAGATTAAAAGTTGAGAGATTGGGAAGTGGTGAATTAAGGCTGAGTCGATTAATAATATTAAAGCTGAATCAATATAAAATTCAGGGTAAATCAACTAATACAATTAAGGCTGAGTCCATTAATAAAATTAAAGTAGAGTCTATTAATACAATCAAAGCCGAATCAATTAATAAAATTCAAGCTAAGCCAATTAACACAATCAAAGCCGAGTCTATTAATACAATTAAGGCTGAATCAATTCATAAAATTAAACCTCAATCAATAAAAAGTACTAGTGCTACACATGTTAAAGTTAGTGATCAAGAACTAGCTAAGCAGTCAAGACGTTCTCAAGATATCATTAAATCATTAGGTTTCCTTTCATCAGACCAAAAAGATATTTTAGTTAAATCTATTAGCTCTTCAAAAGATTCGCAACTTATTCTTAAATTTGTAACACAAGCCACGCAACTGAATAATGCTGAATCAACAAAAGCTAAGCACATGGCTCAAAATGACGTGGCTTCAATAAAAAATATAAGCCTCGAAGTCTTAGAAGAATATAAAGAAAAAATTCAAAGAGCTAGCACTAAGAGTCAAGTTGATGAGCTTGTAGCAGAAGCTAAAAAAGTTGTTAATTCCAATAAAGAAACATTGGTAAATCAGGCCAATGGTAAAAAGCAAGAAATTGCTAAGTTAGAAAATTTATCTAACGATGAAATGTTGAGATATAATACTGCAATTGATAATGTAGTGAAACAGTATAATGAAGGTAAGCTCAATATTACTGATGCAATGAATGCTTTAAATAGTATTAAGCAAGCAGCACAGGAAGTTGCCCAGAAAAACTTACAAAAGCAGTATGCTAAAAAAATTGAAAGAATAAGTTTAAAAGGATTAGCGTTATCCAAAAAGGCTAAAGAAATTTATGAAAAGCATAAAAGTATTTTGCCTACACCTGGATATTATGCAGACTCTGTGGGAACTTATTTGAATAGGTTTAGAGATAAACGAACTTTCGGAAATAGAAGTGTTTGGACTGGTCAAAGTGGACTTGATGAAGCAAAAAAAATGCTTGATGAAGTCAAAAAGCTTTTAAAAGAACTTCAAGACCTTACCAGAGGTACTAAAGAAGATAAAAAACCAGACGTTAAGCCAGAAGCCAAACCAGAGGCCAAACCAAATATTCAAGTACCTAAACAAGCACCTACAGAAGCTGCAAAACCAGCTTTGTCACCAGAAGCCTTGACAAGATTGACTACATGGTATAATCAAGCTAAAGATCTGCTTAAAGATGATCAAGTAAAGGACAAATATGTAGATATACTTGCAGTTCAAAAAGCTGTTGACCAAGCTTATGATCATGTGGAAGAGGGAAAATTTATTACCACTGATCAAGCAAATCAATTAGCTAACAAGCTACGTGATGCTTTACAAAGTTTAGAATTAAAAGATAAAAAAGTAGCCAAACCAGAAGCTAAGCCAGAAGTTAAACCAGAAGCCAAACCAGAGGCCAAACCAGAAGCCAAACCAGAGGCTAAGCCAGAAGTTAAACCAGACGTTAAGCCAGAGGCCAAACCAGACGTTAAGCCAGAAGCCAAACCAGACGTTAAGCCAGAAGTTAAACCAGACGTTAAGCCAGAGGCCAAACCAGACGTTAAGCCAGAAGCTAAGCCAGACGTTAAGCCAGAAGTTAAACCAGAGGCTAAGCCAGAAGCCAAACCAGAGGCTAAACCAGAAATTAAACCAGACGTTAAGCCAGAGGCCAGACCAGAGGCTAAGCCAGAAGTTAAACCAGACGTTAAGCCAGAGGCCAAACCAGAGGCTAAGCCAGAAGTTAAACCAGACGTTAAGCCAGAGGCTAAACCAGAAGCCAAACCAGCAACCAAAAAATCGGTTAATACTAGCGGAAACTTGGCGGTTAAAAAAGCTATTGAAAACAAAAAGTATAGTAAAAAATTACCATCAACGGGTGAAGCCGCAAGTCCACTCTTAGCAATTGTATCACTAATTGTTATGTTAAGTGCAGGTCTTATTACGATAGTTTTAAAGCATAAAAAAAAT

SEQ ID NO: 22058 - protein, 800 aa, Streptococcus agalactiae
  VARIANT 143: Xaa = Any Amino Acid
MNNNEKKVKYFLRKTAYGLASMSAAFAVCSGIVHADTSSGISDSIPHKKQVNLGAVTLKNLISKYRGNDKAIAILLSRVDDFNRASQDTLPQLINSTEAEINNTLPQGRIIKQSIPVVRLKVERLGSGAIKAESINNIKAESXNKIQGKSTNTIKAESINKIKVESINTIKAESINKIQAKPINTIKAESINTIKAESIHKIKPQSIKSTSATHVKVSDQELAKQSRRSQDIIKSLGFLSSDQKDILVKSISSSKDSQLILKFVTQATQLNNAESTKAKHMAQNDVASIKNISLEVLEEYKEKIQRASTKSQVDELVAEAKKVVNSNKETLVNQANGKKQEIAKLENLSNDEMLRYNTAIDNVVKQYNEGKLNITDAMNALNSIKQAAQEVAQKNLQKQYAKKIERISLKGLALSKKAKEIYEKHKSILPTPGYYADSVGTYLNRFRDKRTFGNRSVWTGQSGLDEAKKMLDEVKKLLKELQDLTRGTKEDKKPDVKPEAKPEAKPNIQVPKQAPTEAAKPALSPEALTRLTTWYNQAKDLLKDDQVKDKYVDILAVQKAVDQAYDHVEEGKFITTDQANQLANKLRDALQSLELKDKKVAKPEAKPEVKPEAKPEAKPEAKPEAKPEVKPDVKPEAKPDVKPEAKPDVKPEVKPDVKPEAKPDVKPEAKPDVKPEVKPEAKPEAKPEAKPEIKPDVKPEARPEAKPEVKPDVKPEAKPEAKPEVKPDVKPEAKPEAKPATKKSVNTSGNLAVKKAIENKKYSKKLPSTGEAASPLLAIVSLIVMLSAGLITIVLKHKKN

SEQ ID NO: 22059 - protein, 171 aa, Streptococcus agalactiae; identical to SEQ ID NO: 8435

SEQ ID NO: 22060 - protein, 57 aa, Streptococcus agalactiae; identical to SEQ ID NO: 3726

SEQ ID NO: 22061 - protein, 2319 aa, Streptococcus agalactiae
ATGAAATTATTTGATAAGTTTATAGACTTATTTCGTGTTGACGAAGACAACGACGAAATGACAAGAAAAAATGAACAAGAAACTAGAGAAGAAACTAGTAATTTGGATGGCGAAGAAGTCTATGATATTGATGATATTACCCGACCTAGTAAATCCCAGTATCAGCGAGGCATTCGTCACCAAAAGAAAAATGCTAAATCTCGACCTGAATGGCTACAAAAAGTTGATCGTTACCTCCCTTCTCCTAAGAATCCTATCCGTCGTTTTTGGCGGCGCTATCGTATTGGGAAGTTGCTTTTTATCGCCTTAATGGCTTTTATTCTTATATTTGGTAGCTATCTTTTTTATCTTTCTAAAACTGCTACAGTTAGTGATTTACAGAGTGCTCTAAAAACAACTACCACCATTTATGATAAGAATAAAGAATACGCTGGAAAACTTTCGGGACAAAAGGGAACTTATGTAGAGTTAAATGCTATTTCTGATCATCTCAAAAATGCTGTTATAGCAACTGAAGATAGAACTTTTTATGAAAATAATGGTGTAAACTTTAAGCGATTTTTTTTGGCAGTAGCTACACTTGGGAAATTTGGCGGAGGCTCAACTATTACCCAGCAATTAGCAAAAAATGCTTACTTGTCACAGGACCAAACGATTAAACGCAAGGCGCGTGAATTCTTTTTAGCGCTAGAATTGACTAAGAAATATAGCAAGGCTGAGATTCTGACCATGTATCTTAATAACTCTTATTTTGGTAATGGTGTTTGGGGTGTGGAAGATGCTAGTAGGAAATATTTTGGAACCAGTGCTGCTAATTTGACAGTAGATGAGGCTGCTACACTTGCTGGAATGCTTAAAGGGCCAGAAGTTTATAATCCTTATTATTCTGTTGAAAATGCAACTAACCGAAGAGATACTGTTTTGGCAGCGATGGTTGATGCAGGTAAACTAACCAAGTCTCAAGCTAAAGAAGCTGCTTCAATTGGTATGAAAAATAGATTAGCAGATACCTATGCTGGTAAAATTAATGATTACAGGTACCCATCCTATTTTGATGCTGTTGTCAATGAAGCCATTGATACTTATGGTATTTCAGAAAAAGATATTGTCAATAATGGCTATAAGATTTACACTGCATTAGATCAAAATTATCAATCAGGAATGCAAAAAACATTTGATGATACTAGCCTCTTCCCTGTATCTGACTATGATGGTCAATCTGCCCAAGGTGCTAGCGTAGCTTTAGATCCAAAAACTGGTGGTGTAAGAGGTTTAGTTGGACGTGTTCAAAGTACTAAAGATGCACAGTTTAGAAGTTTTAACTACGCGACTCAATCAAAGAGAAGTCCAGCCTCAACCATAAAACCTTTAGTTGTTTATTCACCAGCTATTGCTTCAGGATGGTCAATAGATAAAGAACTTCCTAATAAAGTTCAAGATTTTCATGGTTATAAACCAAGTAACTATGGTGGGATTGAGACTGAAAGTATCCCGATGTATCAAGCACTAGCTAATTCTTATAATATTCCTGCTGTTTATACTTTAGACAAACTAGGAATCAATAAAGCCTTTACTTATGGCAGGAAGTTTGGTCTAAATATGTCATCAGCAAACAAAGAGCTAGGAGTGGCGCTAGGTGGAAGTGTAACCACTAATCCTTTAGAAATGGCACAAGCTTACTCAACTTTTGCAAATGACGGTATAATGCATCGCGCTCATTTGATTACTCGAATTGAGACAGCTAATGGAAAATTAGTAAAGCAATTTACAGATAAGCCTAAGCGAGTTATTAGTCGCTCAGTGGCTAGTAAAATGACTAGTATGATGTTAGGAACATTCTCAAATGGTACAGCTATTAATGCCAATGTTTATGGTTATACAATGGCAGGTAAAACTGGAACAACCGAAACAGATTTTAACCCCAATTTGTCTGGAGACCAGTGGGTAGTCGGCTATACGCCTGATGTCGTTATTAGTCAATGGGTTGGGTTTAAGAACACAGATAAACACCATTATTTGACAGATTCTAGTGCAGGTACAGCTTCAAATATATTTAGCACTCAAGCTTCATATATACTACCGTATACTAAGGGGTCTAGTTTTACTCATATTGAGAATGCTTATTTCCAAAACGGTATTGGTTCAGTTTATAATGCACAAGATGCTAGTAATACAACGAACCAAGAATCACGCTCAATTATTAATGATTTAAAAGATTCGGCAAGTAAGGCTGCACAAGATATTTCTAGAGCGGTGGAAGATTCAAATTTCCAAGAGAAGGTAAAAGATGCTTGGAATAGTCTAAAGGACTACTTTAGA

SEQ ID NO: 22062 - protein, 773 aa, Streptococcus agalactiae
MKLFDKFIDLFRVDEDNDEMTRKNEQETREETSNLDGEEVYDIDDITRPSKSQYQRGIRHQKKNAKSRPEWLQKVDRYLPSPKNPIRRFWRRYRIGKLLFIALMAFILIFGSYLFYLSKTATVSDLQSALKTTTTIYDKNKEYAGKLSGQKGTYVELNAISDHLKNAVIATEDRTFYENNGVNFKRFFLAVATLGKFGGGSTITQQLAKNAYLSQDQTIKRKAREFFLALELTKKYSKAEILTMYLNNSYFGNGVWGVEDASRKYFGTSAANLTVDEAATLAGMLKGPEVYNPYYSVENATNRRDTVLAAMVDAGKLTKSQAKEAASIGMKNRLADTYAGKINDYRYPSYFDAVVNEAIDTYGISEKDIVNNGYKIYTALDQNYQSGMQKTFDDTSLFPVSDYDGQSAQGASVALDPKTGGVRGLVGRVQSTKDAQFRSFNYATQSKRSPASTIKPLVVYSPAIASGWSIDKELPNKVQDFHGYKPSNYGGIETESIPMYQALANSYNIPAVYTLDKLGINKAFTYGRKFGLNMSSANKELGVALGGSVTTNPLEMAQAYSTFANDGIMHRAHLITRIETANGKLVKQFTDKPKRVISRSVASKMTSMMLGTFSNGTAINANVYGYTMAGKTGTTETDFNPNLSGDQWVVGYTPDVVISQWVGFKNTDKHHYLTDSSAGTASNIFSTQASYILPYTKGSSFTHIENAYFQNGIGSVYNAQDASNTTNQESRSIINDLKDSASKAAQDISRAVEDSNFQEKVKDAWNSLKDYFR

SEQ ID NO: 22063 - protein, 975 aa, Streptococcus agalactiae; identical to SEQ ID NO: 12639

SEQ ID NO: 22064 - protein, 325 aa, Streptococcus agalactiae; identical to SEQ ID NO: 12640

SEQ ID NO: 22065 - protein, 1638 aa, Streptococcus agalactiae
ATGTTTGATTTTTTTAAGAAAAAAGTTGTTAAAGTGTGCTTAGTTATTTTTGGTATAGTTTTAGTATCACTTCTGAGTCTAGGATTCTTTTATTTTTCAAAGGGACAAGTACTTAGTCGTTTTGTAGCAGCACGTTTTCGTACGTCAGGTCAAGCGTTTGATAATATTAAAGAATACATGGTTTGGTCAGATACGGGAGAATCTATCACAAATGATGAGGCCAATTACGCTAATTTTGAGCCCTTGTCTAAAAGTGAGGCGCGTAAATTAGGGCAGGAAATAAAAGAAGGAAACAAAAATGATTCAATGTATCTAAAGCGTGTAGGTAGTCGCTTAGGTATATTCCCTGATTATCGTATTGCTAATAAGCCTATGTCTTTGACCTTGAAAACCAATGTTCCTAAATTGGATGTTTTGTTGAATCAAAAAAAGGTCGCAACAAGCAATTCAGATCATTTTTCAGTAACGGTGGAACGTTTACCTAGAACCCATTATACTGCTAGCCTTGAAGGGACTAGTGACGGAAAAGAGATTAAACTCAAAAAAGATTATGATGGTAAAAACCAAACTATTGATTTATCGGTCGCTTTTAAATCTTTTACAGTAACAAGTAATCTTATGGATGGTAATCTTTATTTTGGTGATAATCGTATTGCTAAATTAAAAGATGGTAGCTATTCCGTAGAGAATTATCCAGTGACTGATGGTTCAAAAGCTTATATCAAAAAGGTTTTTAATGATGGTGAGATAACCTCTCATAAACAAAAATTAATCTCTATCGCTGATAATCAGACAATCAAATTAGATGTTGATGGTTTATTAAATGAAAAAGAAGCTGGACAGAAATTGATAACTGCTTTCAATCAATTGATACTTTATGTATCAACTGGGCAAGACCCTCAGACTTTAGGAACAGTTTTTGAAAAAGGTGCCGAAAATGATTTTTACAAAGGATTGAAAGAAAGTATTAAAGCAAAATTTGTAACTGATAATCGTAAAGCGAGCCATTTCACTATTCCTAATATTGTCCTTAATAAAATGACACAGGTTGGGAAAGAAAGTTATCAAGTTAATTTTGCTGCCGATTATGATTTTAATTATGATAAATCAACAGATCCTGATAAGAAAACATATGGCCACATTATTCAGAATTTAACTGGTAATTTTATTATGAAAAAATCAGGAAATAGTTACCTTATTTCTAATGATGGTAAAAAAGATATCACAGTAGCTAAGGAAACTAATAAAGTTAAGGCTGATCCCGTTTCCATTTTTCCAGAGAACCTTGTAGGAAGTTGGAAAGGTGAAGTTGAGGACGGTACAGTAACGATGACTTTTGATAAGGATGGTAAAGTTACTCAGAAAAAAGTTTACAAGGATAGTAAATCTAAGGAAAGTAACCATTCTGCTAAAGTTACGAAGTTGGAGGATAAGGGAAATGGGCTCTACCTTTATCAATATGAATCAGGTACTGATACTACAACTTTTGTAACAGGAGGTATCGGTGGTCTTAAAGTTAAATACGCCTATGGAATAAAAATTGAAGGGAATAAGATCATCCCAGTAATCTGGCAGACATCTAGTGATGGAGAATTTGATTACCATAAACCACTACTCAGTAAGCCATTAACTAAGCAA

SEQ ID NO: 22066 - protein, 546 aa, Streptococcus agalactiae
MFDFFKKKVVKVCLVIFGIVLVSLLSLGFFYFSKGQVLSRFVAARFRTSGQAFDNIKEYMVWSDTGESITNDEANYANFEPLSKSEARKLGQEIKEGNKNDSMYLKRVGSRLGIFPDYRIANKPMSLTLKTNVPKLDVLLNQKKVATSNSDHFSVTVERLPRTHYTASLEGTSDGKEIKLKKDYDGKNQTIDLSVAFKSFTVTSNLMDGNLYFGDNRIAKLKDGSYSVENYPVTDGSKAYIKKVFNDGEITSHKQKLISIADNQTIKLDVDGLLNEKEAGQKLITAFNQLILYVSTGQDPQTLGTVFEKGAENDFYKGLKESIKAKFVTDNRKASHFTIPNIVLNKMTQVGKESYQVNFAADYDFNYDKSTDPDKKTYGHIIQNLTGNFIMKKSGNSYLISNDGKKDITVAKETNKVKADPVSIFPENLVGSWKGEVEDGTVTMTFDKDGKVTQKKVYKDSKSKESNHSAKVTKLEDKGNGLYLYQYESGTDTTTFVTGGIGGLKVKYAYGIKIEGNKIIPVIWQTSSDGEFDYHKPLLSKPLTKQ

SEQ ID NO: 22067 - protein, 1209 aa, Streptococcus agalactiae; identical to SEQ ID NO: 12643

SEQ ID NO: 22068 - protein, 403 aa, Streptococcus agalactiae; identical to SEQ ID NO: 8444

SEQ ID NO: 22069 - protein, 669 aa, Streptococcus agalactiae; identical to SEQ ID NO: 12645

SEQ ID NO: 22070 - protein, 223 aa, Streptococcus agalactiae; identical to SEQ ID NO: 3742

SEQ ID NO: 22071 - protein, 1200 aa, Streptococcus agalactiae
ATGCAATTTATTTATAGTATTATTGGTATTTTATTGGTATTAGGAATTGTGTATGCAATTTCTTTCAATCGTAAGAGTGTTTCTCTAAGTTTAATTGGAAAAGCTCTTATCGTTCAATTCATTATTGCGCTAATCTTAGTACGTATCCCACTAGGCCAACAAGTTGTTAGTGTTGTTTCAACTGGAGTTACTAAAGTAATCAACTGTGGTCAAGCTGGTTTAAATTTTGTGTTTGGTTCATTAGCAGATAGTGGAGCAAAAACTGGTTTTATTTTCGCCATTCAAACGCTTGGTAATATTGTTTTCTTATCTGCCCTAGTTAGTCTACTTTATTATGTAGGAATCCTTGGATTTGTAGTAAAATGGATAGGTAAGGGTGTTGGTAAAATTATGAAATCCTCAGAGGTTGAGAGTTTTGTTGCCGTAGCTAATATGTTTCTTGGTCAAACAGACAGTCCAATTTTGGTTAGCAAATACCTAGGTCGTATGACTGATAGTGAGATAATGGTTGTGTTGGTATCAGGTATGGGAAGTATGTCAGTTTCTATTCTTGGTGGCTACATTGCATTAGGCATTCCAATGGAATATCTCTTGATTGCTTCAACAATGGTTCCTATTGGCAGTATTCTCATTGCTAAAATCTTATTGCCTCAAACAGAACCTGTTCAAAAAATTGATGACATTAAGATGGATAATAAAGGTAATAACGCCAATGTGATTGATGCAATCGCTGAGGGTGCAAGCACAGGTGCACAAATGGCTTTCTCAATTGGTGCTAGTTTGATTGCCTTTGTTGGTTTAGTTTCTTTGATTAATATGATGTTAAGTGGATTGGGAATCCGCTTAGAACAAATCTTCTCATATGTTTTTGCTCCATTTGGTTTTCTTATGGGATTTGACCACAAAAACATTCTTCTAGAAGGAAACCTTCTTGGAAGTAAGTTGATTTTAAATGAGTTTGTTTCGTTCCAACAATTGGGTCACCTAATCAAATCTTTAGATTATCGTACAGCATTGGTAGCAACTATTTCACTTTGTGGTTTTGCTAATTTATCAAGTTTAGGTATTTGTGTTTCAGGTATTGCTGTTCTTTGTCCAGAGAAACGTGGCACCCTAGCTCGACTTGTTTTCCGTGCAATGATTGGTGGTATTGCTGTAAGTATGCTTAGCGCCTTTATCGTCGGTATTGTAACTCTATTC

SEQ ID NO: 22072 - protein, 400 aa, Streptococcus agalactiae
MQFIYSIIGILLVLGIVYAISFNRKSVSLSLIGKALIVQFIIALILVRIPLGQQVVSVVSTGVTKVINCGQAGLNFVFGSLADSGAKTGFIFAIQTLGNIVFLSALVSLLYYVGILGFVVKWIGKGVGKIMKSSEVESFVAVANMFLGQTDSPILVSKYLGRMTDSEIMVVLVSGMGSMSVSILGGYIALGIPMEYLLIASTMVPIGSILIAKILLPQTEPVQKIDDIKMDNKGNNANVIDAIAEGASTGAQMAFSIGASLIAFVGLVSLINMMLSGLGIRLEQIFSYVFAPFGFLMGFDHKNILLEGNLLGSKLILNEFVSFQQLGHLIKSLDYRTALVATISLCGFANLSSLGICVSGIAVLCPEKRGTLARLVFRAMIGGIAVSMLSAFIVGIVTLF

SEQ ID NO: 22073 - protein, 537 aa, Streptococcus agalactiae
ATGGAAGAATTGAAACTCTGTGGCGCTGATACCTTTATCCGTGTTGGAACATGTGGTGGTATTGACCTTGATGTTAAAGGCGGAGACATCGTTATTGCAACTGGAGCTATCCGTATGGAAGGTACAAGTAAAGAATATGCTCCGATTGAATTTCCTGCTGTAGCTGACTTGGAGGTAACGAATGCTCTAGTTAATGCAGCTAAAAAGCTTGGTTACACAAGTCACGCAGGAGTAGTTCAATGTAAAGATGCATTTTATGGACAACATGAGCCAGAACGTATGCCAGTTAGTTATGAATTATTAAATAAATGGGAAGCATGGAAACGTCTGGGAACAAAAGCGTCTGAAATGGAATCTGCAGCTCTTTTTGTAGCAGCAAGTCATCTAGGAGTTCGTTGTGGATCAGATTTCCTTGTTGTTGGTAATCAAGAACGCAACGCTTTGGGTATGGATAACCCAATGGCTCATGACACAGAAGCAGCTATTCAAGTTGCTGTTGAAGCACTCCGCACACTTATTGAAAATGATAAATCACAA

SEQ ID NO: 22074 - protein, 179 aa, Streptococcus agalactiae
MEELKLCGADTFIRVGTCGGIDLDVKGGDIVIATGAIRMEGTSKEYAPIEFPAVADLEVTNALVNAAKKLGYTSHAGVVQCKDAFYGQHEPERMPVSYELLNKWEAWKRLGTKASEMESAALFVAASHLGVRCGSDFLVVGNQERNALGMDNPMAHDTEAAIQVAVEALRTLIENDKSQ

SEQ ID NO: 22075 - protein, 735 aa, Streptococcus agalactiae; identical to SEQ ID NO: 12653

SEQ ID NO: 22076 - protein, 245 aa, Streptococcus agalactiae; identical to SEQ ID NO: 12654

SEQ ID NO: 22077 - protein, 568 aa, Streptococcus agalactiae
ATGGAGGCTACAACTTCTGATTTTGATCGTGAAAAATTACAAGAACGACTTGCCAAGTTAGCCGGTGGTGTAGCAGTAATTAAAGTTGGTGCAGCGACTGAAACAGAATTAAAAGAGATGAAACTTCGCATCGAAGATGCGTTAAATGCAACGCGTGCTGCAGTTGAAGAAGGTATTGTTTCAGGTGGAGGTACGGCTCTTGTGAACGTTATTGAAAAAGTAGCGGCACTGAAACTTAATGGTGATGAGGAGACTGGACGTAATATTGTTCTTCGTGCTCTCGAAGAGCCTGTTCGTCAAATTGCTTACAATGCTGGATATGAAGGTTCAGTTATTATTGAACGTTTAAAACAGTCTGAAATTGGTACAGGATTTAATGCGGCTAATGGAGAATGGGTAGATATGGTTACCACAGGTATCATTGACCCTGTCAAAGTAACACGTTCTGCACTTCAAAATGCGGCATCTGTAGCAAGTCTTATCTTGACTACAGAAGCAGTAGTAGCAAATAACCTGACCAGAAGCTCCTACAGCTCCTGCAATGGATCCATCTATGATGGGTGGCTTC

SEQ ID NO: 22078 - protein, 190 aa, Streptococcus agalactiae
  VARIANT 171, 173: Xaa = Any Amino Acid
MEATTSDFDREKLQERLAKLAGGVAVIKVGAATETELKEMKLRIEDALNATRAAVEEGIVSGGGTALVNVIEKVAALKLNGDEETGRNIVLRALEEPVRQIAYNAGYEGSVIIERLKQSEIGTGFNAANGEWVDMVTTGIIDPVKVTRSALQNAASVASLILTTEAVVANXPXPEAPTAPAMDPSMMGGF

SEQ ID NO: 22079 - protein, 996 aa, Streptococcus agalactiae
ATGGCAAAAGATATTAAATTTTCAGCAGATGCCCGCTCAGCAATGGTGCGTGGTGTTGATATTTTAGCTGATACAGTCAAAGTAACATTAGGTCCTAAAGGCCGTAATGTTGTTCTTGAAAAAGCATTTGGTTCGCCTTTAATTACAAATGATGGTGTGACAATTGCTAAAGAAATTGAGCTAGAAGATCACTTTGAAAATATGGGAGCTAAACTTGTGTCAGAAGTGGCTTCAAAAACTAATGATATTGCAGGGGATGGCACTACAACTGCTACTGTTTTGACCCAAGCTATTGTACGGGAAGGTCTTAAAAATGTAACTGCAGGGGCGAATCCGATTGGTATTCGTCGTGGTATTGAAACAGCTGTTTCAGCAGCAGTTGAAGAGCTAAAAGAGATTGCACAACCAGTTTCAGGCAAAGAAGCTATTGCTCAAGTTGCAGCTGTGTCTTCACGTTCTGAAAAAGTTGGGGAATATATTTCTGAAGCTATGGAGCGCGTGGGTAATGATGGTGTTATCACTATTGAAGAATCGCGAGGTATGGAAACAGAGCTTGAAGTTGTAGAAGGAATGCAGTTTGACCGTGGGTACTTGTCACAGTATATGGTAACTGATAACGAGAAAATGGTCTCTGAACTTGAGAATCCGTATATCCTTATTACAGATAAGAAAATTTCAAATATCCAAGAAATTTTACCATTATTAGAAGAGGTTCTTAAAACAAATCGTCCATTGCTAATCATCGCTGATGATGTTGATGGAGAAGCTCTCCCAACGCTTGTTCTTAATAAAATTCGTGGAACTTTCATGTCGTAGCTGTTAAAGCGCCTGGATTTGGTGATCGTCGTAAGCCATGCTGGAAGATATGCTATCCTAACAGGAGGAACTGTCGTTACTGAAGACCTTGGTTTAGACTTAAAAGATGCTACTATGCAAGTTTTAGGACAGTCTGCTAAAGTAACAGTAGATAAAGATTCTACTGTTATTGTCNNNNNT

SEQ ID NO: 22080 - protein, 333 aa, Streptococcus agalactiae
  VARIANT 332, 333: Xaa = Any Amino Acid
MAKDIKFSADARSAMVRGVDILADTVKVTLGPKGRNVVLEKAFGSPLITNDGVTIAKEIELEDHFENMGAKLVSEVASKTNDIAGDGTTTATVLTQAIVREGLKNVTAGANPIGIRRGIETAVSAAVEELKEIAQPVSGKEAIAQVAAVSSRSEKVGEYISEAMERVGNDGVITIEESRGMETELEVVEGMQFDRGYLSQYMVTDNEKMVSELENPYILITDKKISNIQEILPLLEEVLKTNRPLLIIADDVDGEALPTLVLNKIRGTFNVVAVKAPGFGDRRKAMLEDIAILTGGTVVTEDLGLDLKDATMQVLGQSAKVTVDKDSTVIVXX

SEQ ID NO: 22081 - protein, 282 aa, Streptococcus agalactiae; identical to SEQ ID NO: 12657

SEQ ID NO: 22082 - protein, 94 aa, Streptococcus agalactiae; identical to SEQ ID NO: 3752

SEQ ID NO: 22083 - protein, 799 aa, Streptococcus agalactiae
ATGTCATTACTTGAATTAGTCAATCTGCACAAAACTTTTGAAAAAGGAACTGTCAATGAGAACCATGTTTTACGTGGTTTAGATTTAACGATTGAAGACGGTGATTTTATTTCAGTAATTGGAGGTAACGGTGCAGGAAAATCAACCCTCCTTAACTGTATTGCTGGTCTAATCTCTATTGATCAGGGGGCAATCACATTAGACAACCAATCAATTACTAAAGACTCTGTAGAAAAACGGTCTAAGGATATTAGTCGAGTCTTTCAGGATCCTAGAATGGGAACTGCAACAAATTTGACGATTGAAGAAAATATGGCAATTGCACATAAAAGAGGCAATAAGCGTCACATTTTTAGACAGTCAGTGACTGACGATGACCGTCAACTATTTAAAAAGTCTCTATCACAATTAGGTCTAGGCTTAGAAAATCGAATGAAGACTGATGCTGCATTTTTATCTGGAGGTCAGCGTCAAGCCCTCACGTTAGCTATGGCAACCTTGTTCGTCCAAATTATTATTACTGGATGAACATACAGCGGCTCTAGATCCCAAAACTAGCGATATGGTTATGGAATTAACACAGAAAGTGATAGAAGAACAACGATTGACAGCCTTAATGATTACACACAATATGGAACATGCCATTGCTTATGGTAATCGTCTCGTGATGCTCTATCACGGGAAAATTGTTGTTGATGTTAAAGGAGAAGCAAAGAGAAACTTAACAGTTGCAGAATTAATGGAACTTTTCCATAAAAACTCAGGTCAACAGTTGATAGATGATGCCCTTGTCTTAGGT

SEQ ID NO: 22084 - protein, 267 aa, Streptococcus agalactiae
MSLLELVNLHKTFEKGTVNENHVLRGLDLTIEDGDFISVIGGNGAGKSTLLNCIAGLISIDQGAITLDNQSITKDSVEKRSKDISRVFQDPRMGTATNLTIEENMAIAHKRGNKRHIFRQSVTDDDRQLFKKSLSQLGLGLENRMKTDAAFLSGGQRQALTLAMATLVRPKLLLLDEHTAALDPKTSDMVMELTQKVIEEQRLTALMITHNMEHAIAYGNRLVMLYHGKIVVDVKGEAKRNLTVAELMELFHKNSGQQLIDDALVLG

SEQ ID NO: 22085 - protein, 354 aa, Streptococcus agalactiae
ATGAAAATGCTAGGATATATGATGGGAATGGCCTGATTGCTTATCTGGTGCACTTTTAGCGCAAAATAATGGCTATGCAGATTTGAATATGGGAGTGGGCACAATCGTTATTGGATTAGCTTCAATTATCTGGCAGAAGTAATGATAAAATACTTACCTCTTGGCAAAAGGTTATGGTCAATTGTATTAGGTTCTGTTTTATACCGTATGATTATTGTTTTCATATTAACAACCGATATTGATGCACAGATGATAAAGTTGGTTTCAGCAATTTTGTTGGCTCTCATTTTGTATGTCCCAGAATTACGAGCTAAACTAGGAGTAAAAACCTCTAAATCGCTTACAAAGGAAGGA

SEQ ID NO: 22086 - protein, 119 aa, Streptococcus agalactiae
  VARIANT 8, 45: Xaa = Any Amino Acid
MKMLGYMXGNGLIALSGALLAQNNGYADLNMGVGTIVIGLASIIXAEVMIKYLPLGKRLWSIVLGSVLYRMIIVFILTTDIDAQMIKLVSAILLALILYVPELRAKLGVKTSKSLTKEG

SEQ ID NO: 22087 - protein, 527 aa, Streptococcus agalactiae
ATGTTAGATATTATCTTATCCGGAATTTCGCAAGGATTACTTTGGTCAATTATGGCAATTGGCGTGTTTATCACTTTTCGTATCTTAGACATAGCCGATCTCTCTGCAGAAGGGGCTTTCCCTATGGGGGCTGCAGTTTGCGCCTTATGTATCGTTAATGATATTAATCCAATTGTGGCAACCATAGCGGGCATGTTAGGTGGTATGTTGGCAGGACTAGTATCGGGTTTTCTTCATACTAAAATGAAAATACCAGCCCTCCTCACAGGTATTATTACGTTGACAGGACTTTACTCTATTAATTTACTTGTTTTAGGAAGATCAAACGTCTCTTTTGCTCTCAAAAATACTTTGGTTACAATGGTAACAAGATTAGGTTTAAATAAACTTTCGCAGTTTTATTAATTGGAATTGTTTGTGTAGGCTTGGTTATCTTAATTTTGTATCTCTTTTTAAATACCCAACTAGGATTAGCTCTAAGAGCGACAGGTGATAATGAGGCTATGGGACAAGCCAATAGTATAAAG

SEQ ID NO: 22088 - protein, 176 aa, Streptococcus agalactiae
MLDIILSGISQGLLWSIMAIGVFITFRILDIADLSAEGAFPMGAAVCALCIVNDINPIVATIAGMLGGMLAGLVSGFLHTKMKIPALLTGIITLTGLYSINLLVLGRSNVSFALKNTLVTMVTRLGLNKLSAVLLIGIVCVGLVILILYLFLNTQLGLALRATGDNEAMGQANSIK

SEQ ID NO: 22089 - protein, 960 aa, Streptococcus agalactiae; identical to SEQ ID NO: 12663

SEQ ID NO: 22090 - protein, 320 aa, Streptococcus agalactiae; identical to SEQ ID NO: 12664

SEQ ID NO: 22091 - protein, 795 aa, Streptococcus agalactiae; identical to SEQ ID NO: 12665

SEQ ID NO: 22092 - protein, 265 aa, Streptococcus agalactiae; identical to SEQ ID NO: 12666

SEQ ID NO: 22093 - protein, 858 aa, Streptococcus agalactiae; identical to SEQ ID NO: 12667

SEQ ID NO: 22094 - protein, 286 aa, Streptococcus agalactiae; identical to SEQ ID NO: 12668

SEQ ID NO: 22095 - protein, 729 aa, Streptococcus agalactiae
ATGATAAAAATTTTGATCCCAACTGCAAAAGAAATGAAAGTGTGTCAAAACATTGCAAGGCCTAAACTGAGTGCACAAACGCAAATTATAATTGATTATTTTTCTACTTTAACTGTTTCAGACTTAGAGGATATCTACAGAATTAATACAAGTGCAGCTCGTTGTGAGGCTCAAAGATGGCAAGATTTTAAATGTAAACAACTTACTCTGAATCCTGCTATTAAGTTATTCAACGGTCTTATGTACCGCAATATCAAAAGGCACAACTTATCCATAAGTGAAGCACAATTTATGGAAAATTCTGTTTTTATTACTAGTGCTCTTTATGGCATCATTCCTGCTATGACACTAATATCCCCTCATCGTTTAGATTTTAACACTAAAATCAAAATCAACAATAACTCTCTTAAAGTTTTTTGGCGTGAAAATTACGATACTTTTATGCAGTCAGATGACATTATGGTTTCTTTGCTTTCTAATGAATTTGAAACCGTCTTTTCTCCTAAAGAGCGTCAAAAACTAATACATCTTAACTTTATTGAAGATCGAGATGGCCAATTAAAAACCCACTCTACCATATCAAAAAAAGCAAGAGGAAAGTGTTTAACTGCTATGATGGAAAATAATTGCCAAACTCTAGAACACTTAAAGCAATTACGCTTTGATGGCTTCTGTTATGATAATGAACTCTCAGACTCTAAGCAATTAACTTTTGTTAAAAAACAGACT

SEQ ID NO: 22096 - protein, 243 aa, Streptococcus agalactiae
MIKILIPTAKEMKVCQNIARPKLSAQTQIIIDYFSTLTVSDLEDIYRINTSAARCEAQRWQDFKCKQLTLNPAIKLFNGLMYRNIKRHNLSISEAQFMENSVFITSALYGIIPAMTLISPHRLDFNTKIKINNNSLKVFWRENYDTFMQSDDIMVSLLSNEFETVFSPKERQKLIHLNFIEDRDGQLKTHSTISKKARGKCLTAMMENNCQTLEHLKQLRFDGFCYDNELSDSKQLTFVKKQT

SEQ ID NO: 22097 - protein, 615 aa, Streptococcus agalactiae; identical to SEQ ID NO: 12671

SEQ ID NO: 22098 - protein, 205 aa, Streptococcus agalactiae; identical to SEQ ID NO: 12672

SEQ ID NO: 22099 - protein, 489 aa, Streptococcus agalactiae; identical to SEQ ID NO: 12673

SEQ ID NO: 22100 - protein, 163 aa, Streptococcus agalactiae; identical to SEQ ID NO: 12674

SEQ ID NO: 22101 - protein, 930 aa, Streptococcus agalactiae; identical to SEQ ID NO: 12675

SEQ ID NO: 22102 - protein, 310 aa, Streptococcus agalactiae; identical to SEQ ID NO: 8476

SEQ ID NO: 22103 - protein, 141 aa, Streptococcus agalactiae; identical to SEQ ID NO: 8477

SEQ ID NO: 22104 - protein, 47 aa, Streptococcus agalactiae; identical to SEQ ID NO: 8478

SEQ ID NO: 22105 - protein, 2169 aa, Streptococcus agalactiae; identical to SEQ ID NO: 12679

SEQ ID NO: 22106 - protein, 723 aa, Streptococcus agalactiae; identical to SEQ ID NO: 12680

SEQ ID NO: 22107 - protein, 1554 aa, Streptococcus agalactiae
ATGAGGAGAAAAATAGTGGTAGAAAACCTAGAAAAACCAATTGGAGTGAGCTATAAAAATAGCCCATCAATGAGTAAACGAACGGCTATCAGAATGAAGAAATCTAGTCGATTTTCAATTTTATTATATAGTGTTTTGTCAACTCTCTTAGCAATTGCAAATCCGTTATTGACTTATTTTGCAAATGGTTTGCAGACTCAGAATCTCTATACAGGTTTGATGATGACCAAAGGACAGATTCCTTATAGTGATGTTTTTGCTACAGGAGGATTTTTATACTATGTAACGATTGCTCTAAGTTACCTTTTAGGGTCTAGTATCTGGTTACTTATTGTACAGTTTATTGCTTACTATGTATCTGGAATTTATTTTTATAAATTAGTTTATTATGTGGCACAAAGTGAAATTGTCTCGATAGGCATGACGTTGATTTTCTATATAATGAATATTGTCTTAGGATTCGGTGGTATGTACCCAATACAGTGGGCATTACCTTTTATGCTCATTTCGCTATGGTTTTTAATTAAATTTTGTGTCGATAATATCGTTGATGAAGCATTTATATTTTATGGCATTTTAGCAGCATTCTCACTATTTATAGATCCCCAAACACTGATTTTTTGGCTTTGCTCTTTTGTTCTCTTAACAGCAACCAATATTAAGCAAAAGCAGTCACTACGAGGATTTTATCAGTTTTTATGCGTTGTTTTTGGTATGATTTTAATTGCTTATACTGTTGGTTACTTTATGTTTAATCTACAGATTATCTCTTCTTATATTGACAAAGCTATTTTTTACCCCTTTACGTATTTCGCTAGGACAAACCACTCATTCCTTCTTAGTTTAGCAATTCAAATTGTTGTCCTTCTAGGGTCAGGTTGTCTCTTTGGACTATGGGATTTTATTCAAAATCGTAAAAAAGCATCTTATCAAATCGGCTTGAACTTTATTGCCTGTATTTTTATTATTTACGCTATAATGGCCATTTTTTCAAGAGATTTTAACCTTTACCACTTTTTACCTGCTTTACCATTTGGTCTTTTGCTAACGAGTAATAAAATTACTATTCTTTACCAAAAAGTGATTGACAGGCGTTCACATAGACGTCAGTATTTCTCTGGTAAATCTCTTATCGTAGACCTTTTTGTAAAGAAAACATATTATTTGCCCCTCTTACTAGTTTCTTTATCGATAGGGTTACTAGTTTATAATACTTATCAAAATGTTACTCTTAGTAAAGAAAGGCGTGACATTTCACATTATTTGACTACAAAAATTGATAGAGATGGTAAGATTTATGTTTGGGACAAAGTTGCTAGCATTTATAGCCAGACTCGGTTAAAATCTGCTTCTCAATTTGTTTTGCCACATATTAATACAGCGCAAAAAAATAATGAGAAAATTTTGAAGGACGAGCTGCTTCAGCATGGGGCTAAATACTTTATCTTAAATAAAAATGAGAAGTTACCAAATGAACTGAAATCTGATATTAAGAAGCACTACCAAGAAGTTCCTCTATCAAATATCACTCATTTTGTTCTATATCGTTTCAAA

SEQ ID NO: 22108 - protein, 518 aa, Streptococcus agalactiae
MRRKIVVENLEKPIGVSYKNSPSMSKRTAIRMKKSSRFSILLYSVLSTLLAIANPLLTYFANGLQTQNLYTGLMMTKGQIPYSDVFATGGFLYYVTIALSYLLGSSIWLLIVQFIAYYVSGIYFYKLVYYVAQSEIVSIGMTLIFYIMNIVLGFGGMYPIQWALPFMLISLWFLIKFCVDNIVDEAFIFYGILAAFSLFIDPQTLIFWLCSFVLLTATNIKQKQSLRGFYQFLCVVFGMILIAYTVGYFMFNLQIISSYIDKAIFYPFTYFARTNHSFLLSLAIQIVVLLGSGCLFGLWDFIQNRKKASYQIGLNFIACIFIIYAIMAIFSRDFNLYHFLPALPFGLLLTSNKITILYQKVIDRRSHRRQYFSGKSLIVDLFVKKTYYLPLLLVSLSIGLLVYNTYQNVTLSKERRDISHYLTTKIDRDGKIYVWDKVASIYSQTRLKSASQFVLPHINTAQKNNEKILKDELLQHGAKYFILNKNEKLPNELKSDIKKHYQEVPLSNITHFVLYRFK

SEQ ID NO: 22109 - protein, 120 aa, Streptococcus agalactiae; identical to SEQ ID NO: 12685

SEQ ID NO: 22110 - protein, 40 aa, Streptococcus agalactiae; identical to SEQ ID NO: 12686

SEQ ID NO: 22111 - protein, 315 aa, Streptococcus agalactiae; identical to SEQ ID NO: 12687

SEQ ID NO: 22112 - protein, 105 aa, Streptococcus agalactiae; identical to SEQ ID NO: 12688

SEQ ID NO: 22113 - protein, 408 aa, Streptococcus agalactiae; identical to SEQ ID NO: 12689

SEQ ID NO: 22114 - protein, 136 aa, Streptococcus agalactiae; identical to SEQ ID NO: 3768

SEQ ID NO: 22115 - protein, 125 aa, Streptococcus agalactiae
AGAGTGGGGACCCTGCTTATGTACCTCGTTACAATGATGCTCGCAATCAAATTCGTAAATATGAACGTGATGAGATTGTAGAAGAGCTCGTTCGTTATTATTTACAAGGAAATGGAATAGATTTG

SEQ ID NO: 22116 - protein, 42 aa, Streptococcus agalactiae
MSGDPAYVPRYNDARNQIRKYERDEIVEELVRYYLQGNGIDL

SEQ ID NO: 22117 - protein, 396 aa, Streptococcus agalactiae; identical to SEQ ID NO: 8491

SEQ ID NO: 22118 - protein, 132 aa, Streptococcus agalactiae; identical to SEQ ID NO: 8492

SEQ ID NO: 22119 - protein, 1137 aa, Streptococcus agalactiae; identical to SEQ ID NO: 12695

SEQ ID NO: 22120 - protein, 379 aa, Streptococcus agalactiae; identical to SEQ ID NO: 3774

SEQ ID NO: 22121 - protein, 1257 aa, Streptococcus agalactiae
GTGAGGGCTGAAATTATCGCTGTAGGAACAGAAATTTTAACAGGACAGATCGTTAATACAAACGCACAATTTTTGTCGGAGAAAATGGCAGAATTGGGAATTGATATTTATTTCCAGACAGCTGTAGGAGACAATGAGGAACGTTTATTATCGCTTTTAGATATAGCTAGTCAGCGCAGTCAATTGGTTATCCTATGTGGTGGACTTGGACCTACAGAGGATGATTTAACGAAACAAACTTTGGCTAAATTTTTAGGTAAATCATTAACAGTGGATTTATTAGCTAGTCAAAAATTGGATCGTTTTTTTGCAAGTCGTCCTCAGTTTGCTAGAACGCCAAATAATGAACGACAAGCTCAATTGGTTGAAGGCTCAATACCTCTACAAAACCTTACTGGTCTAGCTGTTGGTGGTATCGTTACATCTAAGGGAGTCCAATATATGGTTTTACCAGGTCCGCCTAGTGAATTAAATCCAATGGTTATGGAGCAGGTGGTACCTATTTTGTCAAATAATGGTACAAAATTATATTCACGTGTATTGAGATTCTTTGGTATCGGTGAGAGTCAGTTAGTCACAATCTTAGAAGACATAATTAAGAATCAGACAGATCCAACTATAGCACCATATGCAAAGGTTGGTGAGGTAACTTTAAGGTTATCAACGAAAGCTGAAAATCAGGATGAAGCCGACTTTAAATTAGATAGCTTAGAAAAAGAAATACTTGCTCTTAAGACATTAGATAACCGTAAATTAAAAGATTTATTATATGGTTATGGTGATAATAATAGTATGGCACGTACTGTTTTAGAATTATTGAAAGTACAAAATAAAACGATTACTGCCGCAGAGAGCTTAACAGCAGGGTTATTTCAATCTCAGTTAGCAGAATTTTCTGGTGCTTCGCAAGTTTTTAATGGTGGTTTTACGACCTATAGTATGGAAGCAAAATCACAACTTCTCGGCATCCCTAAGAAAAAATTGCAAGAATATGGAGTTATCAGTCATTTTACAGCTGAGGCAATGGCTCAGCAAGCTCGCCAACTTTTAAAAGCAGATTTTGGTATCGGTTTAACGGGAGTTGCTGGTCCTGATGAGTTGGAAGGATACCCTGCAGGTACAGTTTTTATTGGGATTGCAACCCCTGAAGGCGTTTCTTCTATTAAAGTATCGATTGGAGGGAAGAGCCGCTCAGATGTCCGTCATATCAGTACTTTACATGCTTTTGACCTGGTGCGTAGGGCTTTATTAAAGATA

SEQ ID NO: 22122 - protein, 419 aa, Streptococcus agalactiae; identical to SEQ ID NO: 12698

SEQ ID NO: 22123 - protein, 336 aa, Streptococcus agalactiae
ATGTCAGATGCGGATTTAGAGATAATCTTACAAAATCCTAGGGTTATTCGTCATCGTCTAAAACTTTTCTCAACACGACAAAATGCTAGGTCAATTATATTAATTCAGAAAGAATTCGGAAGTTTTGATCGCTACATTTGGTCTTTTGTAGATAATAAAGTACAGGTTAACTCAGTTAACAACTACAACGATGTGCCTGCAAGTACTACCTTATCCGAACGCTTATCTAAGGATTTAAAAAAACGCGGTTTTAAATTTGTTGGTCCAACTTGCCTCTATTCTTTTATTCAGGCCGCGGGTATGGTTAATGACCATGAAAATATATGTGATTTCAAG

SEQ ID NO: 22124 - protein, 112 aa, Streptococcus agalactiae
MSDADLEIILQNPRVIRHRLKLFSTRQNARSIILIQKEFGSFDRYIWSFVDNKVQVNSVNNYNDVPASTTLSERLSKDLKKRGFKFVGPTCLYSFIQAAGMVNDHENICDFK

SEQ ID NO: 22125 - protein, 381 aa, Streptococcus agalactiae; identical to SEQ ID NO: 6713

SEQ ID NO: 22126 - protein, 127 aa, Streptococcus agalactiae; identical to SEQ ID NO: 880

SEQ ID NO: 22127 - protein, 387 aa, Streptococcus agalactiae; identical to SEQ ID NO: 6711

SEQ ID NO: 22128 - protein, 129 aa, Streptococcus agalactiae; identical to SEQ ID NO: 882

SEQ ID NO: 22129 - protein, 651 aa, Streptococcus agalactiae
ATGAACATTTTAGTTGTAGATGATGAGGATATGATTAGAGAGGGAGTAGCTGCTTTTTTGAGAGAAGAAGGCTATCATGTTATTCTAGCAAAGGATGGGCAGGAGGCTTTGGAGAAATTTCATGAGTTCCCTATTCATCTGATGGTCTTGGATTTGATGTTACCGAAGCGGAGTGGATTTGAGGTGTTAAAAGAAATTAATGGAAATCATGATATTCCTGTAATCGTCTTAAGTGCGCTCGGAGATGAGGAAACTCAGATCCAGGTATTTGACCTTTATGCTGATGACCATGTGACAAAACCATTTTCACTGGTGCTCCTAGTCAAGCGTATTCAAGCCCTGCTTAGGCGTTACTATGTTGTGGAGGATATTTGGCATTATCAAGATGTGGCAGTGGATTTCACATCCTACCAAGCTCGAGTCAAGAACGAGGAGGTTGCAATTAAGCCGAAAGAATTGTTGGTTTTAAAATGTTTGATCCAACATAAGAACCAGGTCTTGAGTAGAGAGCAGATACTCGAGTCTATCTCAAATGATTTTGCAGATTTGCCTCTTGATAGAGTAGTTGATGTTTACATTCGAAATCTTCGTAAGAAGTTGGATCTGGATTGCATTGTAACAGTGAAAAATGCCGGATATAAAATTAGCTTA

SEQ ID NO: 22130 - protein, 217 aa, Streptococcus agalactiae
MNILVVDDEDMIREGVAAFLREEGYHVILAKDGQEALEKFHEFPIHLMVLDLMLPKRSGFEVLKEINGNHDIPVIVLSALGDEETQIQVFDLYADDHVTKPFSLVLLVKRIQALLRRYYVVEDIWHYQDVAVDFTSYQARVKNEEVAIKPKELLVLKCLIQHKNQVLSREQILESISNDFADLPLDRVVDVYIRNLRKKLDLDCIVTVKNAGYKISL

SEQ ID NO: 22131 - protein, 1269 aa, Streptococcus agalactiae
TTGGTCATCCACATTGCCATCTATCTGATCTTTCCTTTTTATTACATTCAGCAAGAGGGTGAGAAGTTTAATGAGAGTGCGACTATTATGAGCAGGTACTTAGAAGGCAAAAATTTTCATGAACTGCCTAGTTTGCTGGAGTCCTATTCGAAATCTCTTCGCATCTCTGCCCATTTGAAAGATGACGTACTGGATAAGAGAATTTCCCTTGTGCACGACTTGGAAATAAAGGAAGGCAGTCCCACTAACTATATCGTAACGATTGACCGTCAGATTACGACAGCTGATGGTAAAAAGGTAACCATTCAATTTATTCAAGGTGTGGATATTTATAAAGAGGCAACACGGATTATGCTTCTCTATCTCCCGTATACCTTTTTAGCAACGCTTGTATTTGCCTTTCTCTTTTCCTACTTCTATACGAAACGTTTATTGGAGCCTCTCTTTTATATCTCAAAAGTTACAGGTAAGATGCAGGAGTTGGATCATGATATTCGCTTTGATGAAACGCGAAAGGATGAAGTTGGGGAAGTTGGAAAGCAAATCAATGATGTGTATGAAAACTTGCTGACAGTCATTGATGAATCTGAGAGAAGAAATGAACGGATTGTCAGGTTGCAAAAGCAGAAAGTTTCTTTTGTTCGTGGAGCGTCACATGAGTTGAAAACCCCTTTAGCCAGTCTTCGAATTATTCTAGAGAATATGCAGTACAATATTGGGGATTATAAAGACCACCCTAAGTATATAGCAAAGAGTATTGATCAAATTGACCAAATGAGCCACCTGCTCGAAGAAGTTTTGGAGTCCTCTAAGTTTCAAGAGTGGACAGAGTGTAGCGAGACCTTGATAGTCCAGACTATTTTGACGGATGTTTTATCTCGCTATCAGGAATTAGCACGCTCAAGAGGAATAGAAATTGAAAATCAATTGACAGATGCTACTAGGGTCGTCATGAGTCTCAAGGCATTGGATAAGGTTTTGACAAACCTGATTAGTAATGCGATTAAATATTCAAATAAAAATGGGCGCGTAATCCTATCCGAGCAAGATGGCTATCTTTCTATCAAAAATACCTGCCAACCTCTTAATCAAGAAGAGTTGAATCATTTGTTTGATATTTTTTACCACTCTCAAGTTGTCACAGACAAGTCTGAGGGGTCTGGTTTGGGACTCTATATCGTGAATAACATCCTAGAAAGTTATCAAATGTCCTATAGTTTTCTCCCTTATGAACAAGGAATGGTATTTAAAATTTGCTTGCAAGCAGAT

SEQ ID NO: 22132 - protein, 423 aa, Streptococcus agalactiae
MVIHIAIYLIFPFYYIQQEGEKFNESATIMSRYLEGKNFHELPSLLESYSKSLRISAHLKDDVLDKRISLVHDLEIKEGSPTNYIVTIDRQITTADGKKVTIQFIQGVDIYKEATRIMLLYLPYTFLATLVFAFLFSYFYTKRLLEPLFYISKVTGKMQELDHDIRFDETRKDEVGEVGKQINDVYENLLTVIDESERRNERIVRLQKQKVSFVRGASHELKTPLASLRIILENMQYNIGDYKDHPKYIAKSIDQIDQMSHLLEEVLESSKFQEWTECSETLIVQTILTDVLSRYQELARSRGIEIENQLTDATRVVMSLKALDKVLTNLISNAIKYSNKNGRVILSEQDGYLSIKNTCQPLNQEELNHLFDIFYHSQVVTDKSEGSGLGLYIVNNILESYQMSYSFLPYEQGMVFKICLQAD

SEQ ID NO: 22133 - protein, 633 aa, Streptococcus agalactiae
TTGTATAAAGTAAAAGAACGGAAATCTCTCCGTTCTTTTTTTGTTATAGTTCATATAGGGTTAACATATGGGGTTATTCTTTGTATAGATAAAAGAAAGGATACTAATATGGTATTAGCAATTATTTTAGTAACATTCCTTATTCGATTGATTTTTTTAAAGCGTTCGATAGAAAATGAGAAACGAATCCTTAGCAACGGTGGGCAAGAATTTGGGGTTGAGAATACAAAACGATTGACGTTGGCGCATATTATTTTTTATCTCTCTTGCTTCGTTGAAGCAATGGTGCACAAGACAAATTTTGATGGCATGAGCATGGTTGGTTTAGTCTTGCTTATTTTTTCTATGCTGATGTTGATGTTGGTGATTCACTTGTTGGGAGATATTTGGACAGTAAAGCTTATGCTTGTCAATAATCACAAATTTGTAGATCACTTCCTTTTTAGGACTGTAAAGCATCCTAATTACTTTTTAAATATATTACCAGAACTAGTTGGTTTGGCCCTGGTGAGTCATGCTTATGTGACATTCATCTTTATTTTTCCTGTCTATGCGGTTATTCTTTATCAAAGAATAGCAGAGGAAGAAAAATTATTGCAGGAAGTTATTATTCCGAATGGAAGAATGAAAGGT

SEQ ID NO: 22134 - protein, 211 aa, Streptococcus agalactiae
MYKVKERKSLRSFFVIVHIGLTYGVILCIDKRKDTNMVLAIILVTFLIRLIFLKRSIENEKRILSNGGQEFGVENTKRLTLAHIIFYLSCFVEAMVHKTNFDGMSMVGLVLLIFSMLMLMLVIHLLGDIWTVKLMLVNNHKFVDHFLFRTVKHPNYFLNILPELVGLALVSHAYVTFIFIFPVYAVILYQRIAEEEKLLQEVIIPNGRMKG

SEQ ID NO: 22135 - protein, 908 aa, Streptococcus agalactiae
ATGGGAAGCGTTGCTCATGCAAGTGAGCTTGTAAAGGACGATAGTGTGAAGACTACCGAGGTTGCAGCTAAGCCCTATCCAAGTATGGCTCAAACAGATCAAGGAAATAATTCATCATCCTCGGAACTTGAGACAACAAAGATGGAAATTCCTACAACAGACATAAAAAAAGCTGTTGAACCGGTCGAGAAAACAGCTGGGGAAACATCTGCCACTGATACTGGAAAACGAGAGAAACAATTACAACAATGGAAAAATAATCTAAAAAATGATGTGGATAACACAATTCTATCTCATGAACAGAAAAATGAGTTTAAAACAAAAATTGATGAAACAAATGATTCTGATGCATTATTAGAATTAGAAAATCAATTTAACGAAACTAATAGACTGTTACACATCAAACAACATGAAGAAGTTGAGAAAGATAAGAAAGCTAAGCAACAGAAAACTCTGAAACAGTCAGATACGAAAGTAGATCTAAGCAATATTGACAAAGAGCTTAATCATCAAAAAAGTCAAGTTGAAAAAATGGCAGAGCAAAAGGGAATCACAAATGAAGATAAAGATTCTATGCTGAAAAAAATCGAAGATATTCGTAAACAAGCTCAACAAGCAGATAAAAAAGAAGATGCCGAAGTAAAGGTTCGTGAAGAACTAGGTAAACTCTTTAGTTCAACTAAAGCTGGTCTGGATCAAGAAATTCAAGAGCATGTGAAGAAAGAAACGAGTAGTGAGGAAAATACTCAGAAAGTTGATGAACACTATGCTAATAGCCTTCAGAACTTGCTCAAAAATCTCTTGAAGAACTAGATAAGGCAACTACCAATGAACAAGCTACACAAGTTAAAAATCAATTCTTAGAAAACGCTCAAAAGCTCAAAGAAATACAACCTCTNNNNNTTAAT

SEQ ID NO: 22136 - protein, 303 aa, Streptococcus agalactiae
  VARIANT 262, 301, 302: Xaa = Any Amino Acid
MGSVAHASELVKDDSVKTTEVAAKPYPSMAQTDQGNNSSSSELETTKMEIPTTDIKKAVEPVEKTAGETSATDTGKREKQLQQWKNNLKNDVDNTILSHEQKNEFKTKIDETNDSDALLELENQFNETNRLLHIKQHEEVEKDKKAKQQKTLKQSDTKVDLSNIDKELNHQKSQVEKMAEQKGITNEDKDSMLKKIEDIRKQAQQADKKEDAEVKVREELGKLFSSTKAGLDQEIQEHVKKETSSEENTQKVDEHYANSLQXLAQKSLEELDKATTNEQATQVKNQFLENAQKLKEIQPLXXN

SEQ ID NO: 22137 - protein, 174 aa, Streptococcus agalactiae
TTGATTCTTTTTGATGAATTAGGTCGAGGGACAGCCACTTATGATGGTATGGCATTAGCTCAATCGATTATAGAATATATTTCAATGACCGTGTTAGGGCAAAAACAAATGTTTTTTGCCAAAACTTCATTTTACCCCATGAAAGTTGGACCAGAATTTTTATCTGAACCCAAT

SEQ ID NO: 22138 - protein, 58 aa, Streptococcus agalactiae
MILFDELGRGTATYDGMALAQSIIEYISMTVLGQKQMFFAKTSFYPMKVGPEFLSEPN

SEQ ID NO: 22139 - protein, 387 aa, Streptococcus agalactiae
TTGGCAGTAGTTGCAGAAAATCATCACTATGTTCGTCCCAAATTTAATGATGAACATCAGATTAAGATTAAGAATGGGCGTCATGCAACCGTTGAAAAAGTGATGGGAGTGCAAGAATATATTCCCAATAGTATCTATTTTGATAGTCAGACAGATATCCAGTTGATTACAGGACCAAATATGAGTGGTAAGTCGACCTATATGCGCCAGTTAGCTTTGACAGTTATTATGGCACAAATGGGAGGTTTTGTATCGGCAGACGAAGTTGATTTGCCTGTATTTGATGCAATATTTACTAGGATTGGTGCTGCTGATGACTTAATTTCTGGGCAATCAACCTTTATGGTAGAAATGATGGAAGCGAATCAGGCTGTAAAACGAGCCCAG

SEQ ID NO: 22140 - protein, 129 aa, Streptococcus agalactiae
MAVVAENHHYVRPKFNDEHQIKIKNGRHATVEKVMGVQEYIPNSIYFDSQTDIQLITGPNMSGKSTYMRQLALTVIMAQMGGFVSADEVDLPVFDAIFTRIGAADDLISGQSTFMVEMMEANQAVKRAQ

SEQ ID NO: 22141 - protein, 321 aa, Streptococcus agalactiae
ATGAAACTTCAAAAACCAAAAGGGACTCAGGATATCTTACCTGGAGAATCAGCAAAGTGGCAATACGTTGAAAATGTTATACGCAATCTCTTTAAACAATATCATTATGATGAAATTCGTACACCAATGTTTGAACATTACGAGGTTATTAGTCGCTCAGTTGGGGATACAACGGATATCGTTACAAAAGAGATGTATGATTTTCATGATAAAGGAGATCGTCACATTACGCTTCGTCCAGAAGGAACAGCACCTGTTGTACGTTCTTATGTTGAAAATAAACTATTTGCACCAGAAGTTCAAAAACCAACCAAANNNNNT

SEQ ID NO: 22142 - protein, 107 aa, Streptococcus agalactiae
  VARIANT 106, 107: Xaa = Any Amino Acid
MKLQKPKGTQDILPGESAKWQYVENVIRNLFKQYHYDEIRTPMFEHYEVISRSVGDTTDIVTKEMYDFHDKGDRHITLRPEGTAPVVRSYVENKLFAPEVQKPTKXX

SEQ ID NO: 22143 - protein, 165 aa, Streptococcus agalactiae
ATGGCAGTACCTGCACGTCACACTTCAAAAGCGAAGAAAAACAAACGTCGTACACACTACAAATTGACAGCTCCATCTGTACAATTCGACGAAACTACTGGAGATTACTCACGTTCACACCGTGTATCACTCAAAGGATACTACAAAGGACGTAAAATCNNNNNT

SEQ ID NO: 22144 - protein, 55 aa, Streptococcus agalactiae
  VARIANT 54, 55: Xaa = Any Amino Acid
MAVPARHTSKAKKNKRRTHYKLTAPSVQFDETTGDYSRSHRVSLKGYYKGRKIXX

SEQ ID NO: 22145 - protein, 1241 aa, Streptococcus agalactiae
GTGTTATTTTTGAAAAAAATTATTACTTCTATTCTATTACTTAGTTGCATTTTTTTTATGCCAACCATCTCTGCTGAATCTTTTAATGCTTCCGCTAAACATGCCTTGGCAGTTGATTTAGATTCAGGAAAAATCTTGTATGAAAAAGATGCTAACAAACCCGCTGCTATTGCTTCCTTGACTAAAATAATGACCGTTTATATGGTCTATAAAGAAATTGATAACGGTAACCTCAAGTGGAATACCAAAGTAAATATATTGACTACCCTTATCAACTAACACGCGAATCTGATGCTAGTAATGTTCCTTTAGAAAAAAGGCGCTATACTGTTAAACAGCTCGTGGACGCTGCCATGATTTCTAGTGCTAACAGTGCAGCCATTGCTTTGGCTGAACATATTTCAGGAACCGAAAGTAAATTTGTTGATAAAATGACTGCTCAATTGGAAAAGTGGGGAATTCATGATAGCCACCTAGTCAATGCTTCTGGCTTAAATAATAGTATGTTAGGCAATCACATTTATCCAAAATCGTCACAAAACGACGAAAATAAAATGAGTGCACGTGATATTGCTATTGTTGCCTACCATTTGGTCAACGAATATCCTTCCATTCTTAAGATTACTAGTAAGTCCGTTGCTAAATTTGATAAAGATATTATGCATTCTTATAACTACATGCTACCAGATATGCCTGTCTTTAGACCAGGTATTACAGGTTTGAAAACTGGGACAACGGAATTAGCTGGCCAATCTTTTATTGCTACATCTACTGAAAGTGGAATGAGACTACTCACTGTTATTATGCATGCTGATAAGGCCGATAAAGACAAATATGCTCGCTTTACAGCAACTAACTCTCTCTTGAACTATATCACAAACACCTACGAACCTAACCTTGTATTAGCTAAAGGAGCTGCATATAAAGGTAAAGAAGCAAGTGTGAGAGACGGAAAAGAACAATCGGTCATCGCTGTTGCTAAAAACGATTTGAAAGTAGTACAGAAGAAAAATATCACTAAACAAAATCAGTTAAAAATTAACTTTAAAAAAGAGCTTACTGCTCCTATTACAAAAAAAGAGAACCTAGGGAAAGCTTATTACGTTGACCTTAATAAGGTTGGAAAAGGCTATCTCATAAAGGAACCTAGCGTTCATTTAGTGGCAAAAGATAGTATTGAGCGCAGTTTCTTCCTCAAAGTGTGGTGGAATCATTTTGTGCGCTACGTTAACGAAAAACTT

SEQ ID NO: 22146 - protein, 414 aa, Streptococcus agalactiae
  VARIANT 87: Xaa = Any Amino Acid
MLFLKKIITSILLLSCIFFMPTISAESFNASAKHALAVDLDSGKILYEKDANKPAAIASLTKIMTVYMVYKEIDNGNLKWNTKVNIXDYPYQLTRESDASNVPLEKRRYTVKQLVDAAMISSANSAAIALAEHISGTESKFVDKMTAQLEKWGIHDSHLVNASGLNNSMLGNHIYPKSSQNDENKMSARDIAIVAYHLVNEYPSILKITSKSVAKFDKDIMHSYNYMLPDMPVFRPGITGLKTGTTELAGQSFIATSTESGMRLLTVIMHADKADKDKYARFTATNSLLNYITNTYEPNLVLAKGAAYKGKEASVRDGKEQSVIAVAKNDLKVVQKKNITKQNQLKINFKKELTAPITKKENLGKAYYVDLNKVGKGYLIKEPSVHLVAKDSIERSFFLKVWWNHFVRYVNEKL

SEQ ID NO: 22147 - protein, 1185 aa, Streptococcus agalactiae
ATGCCTAAATTAATCGTATCTTTCCTCTGCATTTTATTATCCCTGACTTGTGTAAACTCTGTGCAAGCTGAAGAACATAAAGATATTATGCAAATTACCCGAGAAGCCGGATATGATGTTAAAGATATTAATAAACCTAAAGCGTCTATCGTTATTGACAATAAAGGTCATATTTTGTGGGAAGATAACGCTGATTTAGAACGTGATCCCGCTAGCATGTCTAAAATGTTTACTTTATATTTACTATTTGAAGACTTAGCTAAAGGAAAAACAAGCCTCAACACCACAGTGACTGCAACAGAAACAGACCAAGCCATAAGTAAGATTTATGAAATTAGTAATAATAATATTCATGCTGGGGTTGCTTATCCTATTCGTGAACTGATTACTATGACAGCTGTCCCGTCATCTAATGTAGCAACTATTATGATTGCTAACCACTTATCACAAAACAATCCTGACGCCTTCATTAAACGAATCAATGAAACCGCCAAGAAACTCGGTATGACAAAAACTCACTTTTATAACCCCAGTGGGGCGGTAGCGAGTGCTTTTAATGGACTTTACTCCCCAAAAGAATACGATAACAATGCTACTAACGTTACGACTGCACGTGATCTATCAATTTTAACCTATCATTTCCTTAAAAAATACCCTGATATACTGAACTATACAAAATATCCTGAAGTCAAGGCCATGGTCGGAACTCCTTATGAAGAAACATTTACAACTTATAACTACTCTACCCCCGGCGCTAAATTTGGATTAGAAGGAGTAGATGGCTTAAAAACTGGTTCTAGCCCTAGCGCTGCTTTTAATGCCTTAGTTACAGCTAAACGCCAGAATACTCGCTTGATAACTGTGGTTTTAGGAGTTGGTGATTGGTCAGACCAAGACGGAGAGTACTATCGTCATCCGTTTGTCAACGCTCTTGTAGAAAAAGGTTTTAAAGACGCTAAAAATATTTCTTCTAAAACTCCTGTATTAAAAGCCGTTAAACCTAAAAAAGAAGTTACTAAAACCAAAACCAAATCTATTCAAGAACAGCCTCAAACAAAAGAACAGTGGTGGACAAAAACAGATCAATTTATTCAATCACATTTTGTATCTATTTTAATTGTTCTGGGCACCATCGCTATCCTTTGTCTTTTAGCTGGGATAGTATTACTTATAAAGCGCTCTAGA

SEQ ID NO: 22148 - protein, 395 aa, Streptococcus agalactiae
MPKLIVSFLCILLSLTCVNSVQAEEHKDIMQITREAGYDVKDINKPKASIVIDNKGHILWEDNADLERDPASMSKMFTLYLLFEDLAKGKTSLNTTVTATETDQAISKIYEISNNNIHAGVAYPIRELITMTAVPSSNVATIMIANHLSQNNPDAFIKRINETAKKLGMTKTHFYNPSGAVASAFNGLYSPKEYDNNATNVTTARDLSILTYHFLKKYPDILNYTKYPEVKAMVGTPYEETFTTYNYSTPGAKFGLEGVDGLKTGSSPSAAFNALVTAKRQNTRLITVVLGVGDWSDQDGEYYRHPFVNALVEKGFKDAKNISSKTPVLKAVKPKKEVTKTKTKSIQEQPQTKEQWWTKTDQFIQSHFVSILIVLGTIAILCLLAGIVLLIKRSR

SEQ ID NO: 22149 - protein, 1416 aa, Streptococcus agalactiae; identical to SEQ ID NO: 9065

SEQ ID NO: 22150 - protein, 472 aa, Streptococcus agalactiae; identical to SEQ ID NO: 308

SEQ ID NO: 22151 - protein, 441 aa, Streptococcus agalactiae
ATGGCACTCTCTAAATTAGATAACCTCTACATGGCGGTGGTAGCTGATCATTCAAAACACCCTCATCATCATGGATTTTTAGAAGGCGTTGAACAAGTGCAGTTAAACAATCCTACATGTGGAGATGTTATTTCCTTATCTGTTAAATTTGATGGGAATATTATTTCAGATATTGCATTTGCTGGTAATGGTTGTACAATTTCTACGGCTTCATCAAGCATGATGACAGATGCAGTTATTGGGAAAACAAAAGAAGAAGCATTGCAGCTTGCTGATGTATTCTCCAAAATGGTTCAAGGCGATCAAAATCCAAAACAAGAGAAACTTGGGGATGCAGAGTTTCTAGCTGGGGTATCAAAATTTCCACAACGTATCAAATGTGCTACGCTTTCGTGGAATGCTTTAAGAAAGGCTATTGAGAGAGATAATCAGGCAGAACTC

SEQ ID NO: 22152 - protein, 147 aa, Streptococcus agalactiae; identical to SEQ ID NO: 306

SEQ ID NO: 22153 - protein, 1230 aa, Streptococcus agalactiae; identical to SEQ ID NO: 13477

SEQ ID NO: 22154 - protein, 410 aa, Streptococcus agalactiae; identical to SEQ ID NO: 13478

SEQ ID NO: 22155 - protein, 1260 aa, Streptococcus agalactiae; identical to SEQ ID NO: 13475

SEQ ID NO: 22156 - protein, 420 aa, Streptococcus agalactiae; identical to SEQ ID NO: 13476

SEQ ID NO: 22157 - protein, 768 aa, Streptococcus agalactiae; identical to SEQ ID NO: 13473

SEQ ID NO: 22158 - protein, 256 aa, Streptococcus agalactiae; identical to SEQ ID NO: 300

SEQ ID NO: 22159 - protein, 1158 aa, Streptococcus agalactiae
ATGATACCTTTTACAATTGAGTATATTTTTGTATTGATTGGAGCATTTTTATTATCAATCATTCTAACTCCTATTATTCGAGTTATATCTTTGAAGGTAGGAGCGGTTGATAAACCGAACGCTCGAAGAATCAACAAAGTACCAATGCCAAGTAGTGGTGGTTTAGCAATATTTCTCTCCTTTGTTGTAACAACATTATTTTTCATGCCAATGGCGGCCAGTAGACACTTTATAGAAGTCTCTTATTTTCACTACATTTTGCCTGTAATTATTGGCGGTCTCGTAGTTACAACAACAGGATTTATAGATGACATCTTTGAATTAAGACCTCGTTATAAAATGTTGGGAATTATTATTGCAGCTATTATCATATGGAAATTTACACATTTTAGATTTGATAGTTTTAAGATTCCAATAGGTGGTCCACTCTTGGAGTTTGGTCCTATTTTAACTTTCTTTTTGACAGTTTTATGGATTATTTCAATCACTAATGCTATCAATCTGATTGATGGTCTAGATGGTCTAGTTAGTGGTGTTTCAATCATCAGTCTAGCAACGATGGCAGTGGTTTCTTATTTCTTTTTACCTAAAATAGATTTTTTTCTCACGCTAACTATTGTTATTTTAATCGCCTCAATAGTTGGTTTTTTCCCTTATAATTATCATCCAGCCATTATCTACCTAGGTGATGCTGGTGCCTTGTTTATAGGATTTATGATTGGTGTATTATCGCTTCAAGGTTTAAAAAACTCCACAGCTGTTGCAGTGATAACACCTGTCATTATTTTAGGAGTTCCTATTTTGGATACAGCTGTTGCTATTGTGAGGCGTAAATTATCAGGGAAAAAGATTTCTGAAGCTGATAAGATGCACCTGCATCACCGATTGCTATCTATGGGATTTACACATAGAGGAGCAGTTTTAGTTGTTTATGGTATTGCAATTATCTTTTCGCTTATCGCTTTGCTTTTAAATGTTTCTAGTCGTATTGGGGGAATTTTTCTTCTATTGGCTCTACTATTAGTAATGGAAATTTTTATAGAAGGTTTAAATATTTGGGGTGAGAATCGGACACCGCTATTTAATCTCTTAAAGTTCATTGGCAACAGTGATTACAGACAAAGTGTTATTGCTAAATATAGCGATAAGCATCAAAAA

SEQ ID NO: 22160 - protein, 386 aa, Streptococcus agalactiae; identical to SEQ ID NO: 13472

SEQ ID NO: 22161 - protein, 681 aa, Streptococcus agalactiae
ATGGAGCTGAAAGATTTCCTAATCCCTCAGGAGAAGACTGAGGAATTTTTCTATTCTGTCATGGATGAATTAGACTTGCCAGAAAACTTTAAAAATAGTGGTATGTTAAGTTTTCGAGTAACACCTAAAAAAGATCGCATTGATGTTTTTGTTACAAAGTCTGAATTAAGTAAAGATTTAAATTTAGAAGAATTAGCAGATTTGGGTGACATTTCAAAAATGTCTCCAGAAGACTTTTTTAAAACATTGGAACAATCGATGTTGGAAAAAGGGGATACGGATGCCCATGCCAAATTAGCAGAAATTGAAAATATGATGGATAAAGCAACTCAAGAAGTAGTTGAGGAAAATGTTTCTGAAGAACAAGCTGAAAAGGAAGTAGAAACGATTGGATATGTTCACTATGTCTTTGATTTTGATAATATTGAAGCTGTAGTTCGATTTTCACAAACGATTGATTTTCCAATAGAAGCTTCTGAACTCTATAAAAATGGTAAAGGCTATCATATGACAATTTTGCTAGACTTGGAAAACCAACCAAGCTACTTTGCTAATTTGATGTATGCTCGAATGCTTGAACATGCTAATGTGGGCACAAAAACACGAGCTTACTTGAAAGAGCATAGTATTCAATTGATTCATGATGATGCTATTTCAAAATTACAAATGATTGAGATGGGA

SEQ ID NO: 22162 - protein, 227 aa, Streptococcus agalactiae
MELKDFLIPQEKTEEFFYSVMDELDLPENFKNSGMLSFRVTPKKDRIDVFVTKSELSKDLNLEELADLGDISKMSPEDFFKTLEQSMLEKGDTDAHAKLAEIENMMDKATQEVVEENVSEEQAEKEVETIGYVHYVFDFDNIEAVVRFSQTIDFPIEASELYKNGKGYHMTILLDLENQPSYFANLMYARMLEHANVGTKTRAYLKEHSIQLIHDDAISKLQMIEMG

SEQ ID NO: 22163 - protein, 837 aa, Streptococcus agalactiae
ATGTTAATAATTGAATTACTCAAAGCCCTATTTTTAGGAGTCGTTGAGGGAGTGACAGAATGGTTACCTGTTTCTAGTACTGGCCATTTAATCTTGGTTCAAGAGTTTATGAAGTTGAACCAAAGCAAATCCTTTGTTGAAATGTTTAATATTGTTATACAACTTGGGGCAATTATGGCAGTTATTGTCATTTATTTTAAACGCCTTAACCCATTTCAGCCAGGTAAATCTGCTAGAGAAATTCGTTTAACTTGGCAATTATGGTTAAAAGTAGTGATAGCTTGTATTCCATCTATTTTAATTGCTTTACCATTTGATAATTGGTTTGAAGCTCATTTTAATTTCATGATCCCGATTGCAATAGCCCTAATCTTTTATGGTTTTGTCTTCATATGGGTTGAAAAACGTAATGCACACCTCAAACCACAGGTAACCGAATTGGCAAGTATGTCTTATAAGACAGCTTTCTTGATTGGATGCTTCCAGGTTCTCAGTATTGTTCCGGGAACCAGTCGTTCTGGAGCTACTATTTTAGGAGCAATTATTATTGGAACTAGTCGTTCGGTCGCTGCTGACTTTACTTTCTTCCTTGCCATCCCAACTATGTTTGGTTATAGTGGACTTAAGGCGGTTAAATACTTTTTAGATGGTAACGTCTTGAGTTTAGACCAATCTTTAATACTTTTAGTAGCAAGTCTGATAGCTTTCGTAGTTAGTTTATATGTTATTCGTTTCTTGACAGACTATGTCAAACGACACGATTTCACCATCTTTGGTAAGTATCGTATAGTCTTAGGAAGTTTACTCATCCTCTACTGGTTAGTTGTTCATTTATTC

SEQ ID NO: 22164 - protein, 279 aa, Streptococcus agalactiae
MLIIELLKALFLGVVEGVTEWLPVSSTGHLILVQEFMKLNQSKSFVEMFNIVIQLGAIMAVIVIYFKRLNPFQPGKSAREIRLTWQLWLKVVIACIPSILIALPFDNWFEAHFNFMIPIAIALIFYGFVFIWVEKRNAHLKPQVTELASMSYKTAFLIGCFQVLSIVPGTSRSGATILGAIIIGTSRSVAADFTFFLAIPTMFGYSGLKAVKYFLDGNVLSLDQSLILLVASLIAFVVSLYVIRFLTDYVKRHDFTIFGKYRIVLGSLLILYWLVVHLF

SEQ ID NO: 22165 - protein, 899 aa, Streptococcus agalactiae
TTGATTGATAGAAAAGTATTGAATTATGATGATAACTTGTTATCTCTAGCTAACTTAGATAAGCTTCTGATGCAGAAATAGATTTTATAGAGTTTGCTTTTGCGGATTCTACGAGTTTGAAGCCAGACCAACTCTTTTCTAATTACCAATTTAGTTATAAAGAAACACTACGTGAACTGAAAAAGCAGCACAAGGCTTCAGATCTGCAAACTCAAATGAGACGCCGAGGAAGTAATGCCTTATCAAGAATTACGCGTCTCACAAGGTTGATTTCTAAAGATAATATAAACTCTCTTAGAAGAAAGGGAATTTCATCACCTTATCGTAAAATGTCTTCAGAAGAGTCTAAAGAATTATCTAGGTTGAAAAGATTCAGTTACCTATCACCTCTTATTTCTTTTGTTGTTATAATTTATACGCTTTTTTTAAATTATTTTACCTATTTCTGTATCTATCTCTTATTGTTTGTTGTTATCCTGTTGTTGAATAAAATCATTTTTATGATGACAAGAAAAATAAGTAACGGTTATATTGTAACTGAAGATGGAGCAAGTCGTGTCTACCAATGGACTAGTTTTAGGAACATGCTAAGGGATATCAAATCGTTTGATCGTTCAGAGTTAGAAAGTATCGTATTATGGAATCGAATATTGGTTTACGCTACTTTATTCGGCTACGCTGACCGTGTTGAGAAAGTACTCAGAGTGAACCAAATAGATATTCCAGAAAGATTTGCAAACATTGATAGTCATCAATTTGCGATTTCAGTCAATCAATCTAGTAATCATTTTTCAACGATAACTGAAAATGTTAGTCACGCTTCTAATTTTAGTGTTAATTCAGGCGGTTCTTCAGGTGGTTTCTCAGGCGGCGGAGGCGGCGGAGGTGGCGGTGCCTTC

SEQ ID NO: 22166 - protein, 300 aa, Streptococcus agalactiae
  VARIANT 21: Xaa = Any Amino Acid
MIDRKVLNYDDNLLSLANLDXASDAEIDFIEFAFADSTSLKPDQLFSNYQFSYKETLRELKKQHKASDLQTQMRRRGSNALSRITRLTRLISKDNINSLRRKGISSPYRKMSSEESKELSRLKRFSYLSPLISFVVIIYTLFLNYFTYFCIYLLLFVVILLLNKIIFMMTRKISNGYIVTEDGASRVYQWTSFRNMLRDIKSFDRSELESIVLWNRILVYATLFGYADRVEKVLRVNQIDIPERFANIDSHQFAISVNQSSNHFSTITENVSHASNFSVNSGGSSGGFSGGGGGGGGGAF

SEQ ID NO: 22167 - protein, 967 aa, Streptococcus agalactiae
ATGAAGAAATGTTTTTTGGCTATTTGTTTAGCTCTTAGTTTTTTTATGGTTTCAGTTCAAGCAGATGAGGTGGACTATAACATTCCTCATTATGAGGGTAATCTAACTATTCACAATGATAATAGTGCTGATTTTACAGAGAAGGTTACTTACCAATTTGATTCGTCCTATAATGGACAGTATGTCACATTAGGTACGGCGGGTAAGTTACCTGACAATTTTGATATTAATAATAAGCCACAGGTTGAAGTTTCAATTAATGGTAAAGCAAGGAAAGTTAGTTGCCAGATAGAAGATTTGGAGGATGGCTACCGTTTGAAAGTGTTTAATGATGGTGAAGCAGGTGATACTGTTAAAGTCAATGTTCAGTGGAAACTAAAAAATGTTCTATTTATGCATAAGGATGTTGGTGAACTTAACTGGATTCCTATTAGCGACTGGGATAAACGTTAGAGAAGTAGATTTTTGGATATCAACTGACAAAAGGTTGCTCTTTCTCGTCTTTGGGGGCACTTGGGTTATCTTAAACTCCTCCTAAAATAAGACAAAATAATAATCGTTACCATTTGACAGCTTTTAATGTAAACAAACGATTAGAATTTCATGGTTATTGGGATAGATCTTATTTTAATCTACCTACAAACAGTAAAAATAATTACAAGAAAAAAATTGAACATCAAGAGAAGATGATAGAGCGTCATGGTTTTATCCTAAGTTTCTTGTAAGGATATTATTACCTTCATTCTTTATTATTGTGACACTATTCATCTCAATTAGGGTGTCCCTGTTTAGAAAAAAAGTTAATAAATACGGGCAATTCCCTAAGGATCTTCATTTATATGAAGCACCTGAGGACCTTTCACCACTAGAGTTAACTCAAAGCATTTATAGTATGAGCTTAAAATTTTCAAGATGAGGAGAAGAAAACACACCTTATCAGTCAGAACAACTCATTCAGTCATTCTAT

SEQ ID NO: 22168 - protein, 325 aa, Streptococcus agalactiae
  VARIANT 243, 317, 323: Xaa = Any Amino Acid
MKKCFLAICLALSFFMVSVQADEVDYNIPHYEGNLTIHNDNSADFTEKVTYQFDSSYNGQYVTLGTAGKLPDNFDINNKPQVEVSINGKARKVSCQIEDLEDGYRLKVFNDGEAGDTVKVNVQWKLKNVLFMHKDVGELNWIPISDWDKTLEKVDFWISTDKKVALSRLWGHLGYLKTPPKIRQNNNRYHLTAFNVNKRLEFHGYWDRSYFNLPTNSKNNYKKKIEHQEKMIERHGFILSFLXRILLPSFFIIVTLFISIRVSLFRKKVNKYGQFPKDLHLYEAPEDLSPLELTQSIYSMSFKIFKMRRRKHTLSVXNNSFSXFY

SEQ ID NO: 22169 - protein, 1291 aa, Streptococcus agalactiae
ATGAAAAAAATATTACTAAGTTTATTCACTGCTTTGCTTATCACCTCTGGAGGTATGACAAGTATACAAGCAGATGAATATCTACGTGTCGGTATGGAGGCAGCCTATGCGCCTTTCAACTGGACACAAAATGATAACACAAATGGTGCCGTTCCTATTGAAGGAACTGATCAATATGCTAATGGTTATGATGTACAAGTCGCTAAAAAGTTAGCTAAAAAGTTAAATAAAAAAGTTGTTGTTGTCAAAACAAAATGGGAAGGCCTTGTTCCAGCACTAACTTCTGGAAAACTCGATATGATTATTGCAGGAATGAGTCCTACCGAAGAACGTAAAAAAGAAATTAATTTTTCAAAGCCTTACTACATTTCAGAACCTACTCTAGTTGTTAATGCTGAAGGAAAATATACTAATGCTAAAAATATTAGTGATTTCAAAAATGCTAAAGTAACTGCCCAACAAGGAGTCTACTTATACAACCTTATTGATCAAATCAATGGTGTCAAAAAAGAAGTTGCCATGGGGGACTTTAATCAATTAAGACAAGCTGTAGAATCTGGTGTTGTAGACGCCTATGTTTCAGAACGTCCAGATGCAACTTCCGCTCAAACTGCTAATCCTAAATTAAAAATGATTGAACTGCACCAAGGGTTTAAAACATCTGATGCCGATACAAATATTTCTGTTGGTATGCGTAAAGGTGACAATCGTATTAATCAAGTCAATCAAGTTCTCGAGAGCATTTCTAGAGATAAACAAATCGCCTTGATGGATAAGATGATTAAAGAACAACCATCCGTTAAAAAAGAAAAAAATGGAAAACCAAACTTCTTTGAACAGATGGCAACTATTTTAAAAAACAATGGTTCTCAATTCCTCAGAGGAACAGCTACAACCCTCCTAATTTCTATGGTGGGAACTATCGTCGGATTATTTATCGGCCTTCTCATCGGTGTTTTCCGTACAGCACCAAAATCTGACAATAAGTTAAAGGCTGCCTTACAAAAATTATTAGGTTGGTTACTTAACATCTATATTGAGGTCTTCCGCGGGACACCTATGATTGTACAATCAATGGTTATCTACTACGGAACAGCACAAGCTTTCGGAGTTTCGCTGGACCGTACACTAGCAGCTATATTTATTGTTTCAATCAATACTGGTGCTTATATGAGCGAAATTGTACGTGGTGGTATTTTCTCTGTTGATAAAGGACAATTTGAAGCCGCACTGCACTTGGTTTCACCCACGGACAAACCATGCGAAAAATTGTTCTACCACAAGTTGTACG

SEQ ID NO: 22170 - protein, 431 aa, Streptococcus agalactiae
  VARIANT 409: Xaa = Any Amino Acid
MKKILLSLFTALLITSGGMTSIQADEYLRVGMEAAYAPFNWTQNDNTNGAVPIEGTDQYANGYDVQVAKKLAKKLNKKVVVVKTKWEGLVPALTSGKLDMIIAGMSPTEERKKEINFSKPYYISEPTLVVNAEGKYTNAKNISDFKNAKVTAQQGVYLYNLIDQINGVKKEVAMGDFNQLRQAVESGVVDAYVSERPDATSAQTANPKLKMIELHQGFKTSDADTNISVGMRKGDNRINQVNQVLESISRDKQIALMDKMIKEQPSVKKEKNGKPNFFEQMATILKNNGSQFLRGTATTLLISMVGTIVGLFIGLLIGVFRTAPKSDNKLKAALQKLLGWLLNIYIEVFRGTPMIVQSMVIYYGTAQAFGVSLDRTLAAIFIVSINTGAYMSEIVRGGIFSVDKGQFEXRNCTWFHPRTNHAKNCSTTSCT

SEQ ID NO: 22171 - protein, 361 aa, Streptococcus agalactiae
GTGGTGGTATTTTCTCTGTTGATAAAGGACAATTTGAAGCCGCACTGCACTTGGTTTCACCCACGGACAAACCATGCGAAAAATTGTTCTACCACAAGTTGTACGTAACATACTCCCAGCTACTGGTAATGAGTTTGTTATCAATATCAAAGATACCTCTGTACTGAACGTTATCTCTGTTGTCGAACTCTACTTCTCTGGTAATACTGTTGCAACACAAACCTACCAATATTTCCAAACATTCACCATTATTGCGATTATTTACTTCATCTTAACCTTCACCGTAACACGTACCTTACGTTACATTGAAAAACGTTTTGATTCAGATAATTACACAACCGGTGCGAATCAATTACAAGTC

SEQ ID NO: 22172 - protein, 121 aa, Streptococcus agalactiae
  VARIANT 13: Xaa = Any Amino Acid
MVVFSLLIKDNLXAATALGFTHGQTMRKIVLPQVVRNILPATGNEFVINIKDTSVLNVISVVELYFSGNTVATQTYQYFQTFTIIAIIYFILTFTVTRTLRYIEKRFDSDNYTTGANQLQV

SEQ ID NO: 22173 - protein, 738 aa, Streptococcus agalactiae
ATGACACAAGCTATTTTAGAAATTAAACATTTGAAAAAATCTTACGGAAGCAATGAAGTGTTAAAAGACATTTCGCTTTCGGTCAACAAAGGCGAAGTTATTTCTATCATTGGTTCTTCTGGATCAGGAAAATCAACTTTCCTACGTTCTATTAACCTCTTAGAAGAACCAAGTGGAGGAGAAATCTTATATCACGGTCACAATGTTCTTGAAAAAGGTTATGATTTAAATAATTATCGTGAAAAACTTGGGATGGTCTTTCAATCTTTTAACCTCTTTGAAAATTTAAACATCTTAGAGAATGCTATTGTCGCACAGACTACTGTTCTAAAACGTGAACGCCAAGAAGCTGAAAAGATTGCTAAAGAAAACTTAAATGCTGTTGGCATGACTGAGCAATATTGGAAAGCTAAACCAAAACAATTATCAGGTGGGCAAAAGCAACGTGTCGCAATCGCCCGAGCACTTTCTGTTAACCCAGAAGCTATACTTTTTGATGAACCAACTTCAGCCTTGGATCCAGAAATGGTTGGTGAGGTCCTTAAAACAATGCAAGATCTAGCTAAATCTGGATTAACAATGATAATTGTGACACACGAGATGGAATTTGCTAAAGAAGTATCAGACCGCGTTATTTTCATGGACAAAGGAATCATTGCAGAGCAGGGTACTCCTAAACAACTTTTCGAAAATCCAACACAAGAAAGAACTAAGGAATTTCTACAACGCTTCTTAAAA

SEQ ID NO: 22174 - protein, 246 aa, Streptococcus agalactiae; identical to SEQ ID NO: 4604

SEQ ID NO: 22175 - protein, 168 aa, Streptococcus agalactiae
ATGAAACTTAAAATCAGTGTTTTAACAGCAGCTTCAGCTGTCACTCTATTATTAGCTACTTCAGCAAGTCTTGCGAAGGCAGACACAGTGTCTTATCCTTCACGTGATGCCGGATTTGTCTACTCTCGTGGGTATGCTCCAAAACACTTCCTAAGTGCTTACGATAAA

SEQ ID NO: 22176 - protein, 56 aa, Streptococcus agalactiae
MKLKISVLTAASAVTLLLATSASLAKADTVSYPSRDAGFVYSRGYAPKHFLSAYDK

SEQ ID NO: 22177 - protein, 381 aa, Streptococcus agalactiae; identical to SEQ ID NO: 6713

SEQ ID NO: 22178 - protein, 127 aa, Streptococcus agalactiae; identical to SEQ ID NO: 880

SEQ ID NO: 22179 - protein, 387 aa, Streptococcus agalactiae; identical to SEQ ID NO: 6711

SEQ ID NO: 22180 - protein, 129 aa, Streptococcus agalactiae; identical to SEQ ID NO: 882

SEQ ID NO: 22181 - protein, 588 aa, Streptococcus agalactiae; identical to SEQ ID NO: 12701

SEQ ID NO: 22182 - protein, 196 aa, Streptococcus agalactiae; identical to SEQ ID NO: 12702

SEQ ID NO: 22183 - protein, 1230 aa, Streptococcus agalactiae; identical to SEQ ID NO: 12703

SEQ ID NO: 22184 - protein, 410 aa, Streptococcus agalactiae; identical to SEQ ID NO: 12704

SEQ ID NO: 22185 - protein, 1977 aa, Streptococcus agalactiae; identical to SEQ ID NO: 12705

SEQ ID NO: 22186 - protein, 659 aa, Streptococcus agalactiae; identical to SEQ ID NO: 12706

SEQ ID NO: 22187 - protein, 99 aa, Streptococcus agalactiae; identical to SEQ ID NO: 6435

SEQ ID NO: 22188 - protein, 33 aa, Streptococcus agalactiae; identical to SEQ ID NO: 6436

SEQ ID NO: 22189 - protein, 201 aa, Streptococcus agalactiae; identical to SEQ ID NO: 6433

SEQ ID NO: 22190 - protein, 67 aa, Streptococcus agalactiae; identical to SEQ ID NO: 6434

SEQ ID NO: 22191 - protein, 2574 aa, Streptococcus agalactiae; identical to SEQ ID NO: 12711

SEQ ID NO: 22192 - protein, 858 aa, Streptococcus agalactiae; identical to SEQ ID NO: 12712

SEQ ID NO: 22193 - protein, 435 aa, Streptococcus agalactiae; identical to SEQ ID NO: 12713

SEQ ID NO: 22194 - protein, 145 aa, Streptococcus agalactiae; identical to SEQ ID NO: 3792

SEQ ID NO: 22195 - protein, 1689 aa, Streptococcus agalactiae
ATGGATACAAAACATCTAATTGCGAGTGAAATTCAAAAAGTTGTTCCAGATATGGAACAATCGACCATTCTTTCTTTATTAGAAACCCCAAAAAATTCGAGCATGGGAGATTTAGCTTTCCCAGCATTCTCTTTGGCTAAAACTCTACGCAAAGCACCTCAAATAATTGCTAGTGACATTGCTGAACAAATTAAAAGCGACCAATTTGAAAAGGTGGAAGCTGTTGGACCTTACGTTAACTTTTTCCTTGATAAAGCCGCAATCTCAAGTCAAGTTCTAAAACAAGTCTTATCTGATGGTTCTGCCTATGCTACTCAAAATATTGGTGAAGGACGAAATGTTGCCATTGACATGTCTAGTCCAAATATTGCTAAGCCATTCTCAATTGGACACCTTCGTTCAACAGTTATTGGTGATAGTTTAGCTAATATTTTTGATAAAATTGGCTATCATCCTGTTAAAATTAATCACCTTGGCGACTGGGGTAAACAATTTGGAATGTTAATCGTTGCTTATAAAAAATGGGGCAATGAAGAGGCTGTCCGTGCTCATCCCATTGATGAACTTTTAAAACTTTATGTCCGTATTAATGCTGAAGCCGAGACAGACCCTAGCGTTGATGAAGAGGCACGTGAGTGGTTTCGTAAACTTGAAGCTAACGATCCTGAAGCAACTGAATTATGGCAATGGTTCCGTGACGAGTCATTATTAGAATTCAACCGTCTTTACGATAAAATGAATGTTACATTTGATAGCTATAACGGCGAGGCATTCTACAACGACAAAATGGAGGAAGTGCTTGAACTGCTAGAATCTAAAAACCTCCTGGTCGAATCTAAAGGTGCACAAGTTGTTAACCTAGAAAAATACGGTATTGAACATCCTGCCCTCATTAAGAAATCCGATGGAGCAACTCTCTACATTACACGCGACTTAGCTGCTGCACTTTACCGTAAACGTACCTACGATTTTGCAAAATCAATCTACGTTGTAGGAAACGAACAGTCTGCACACTTTAAACAACTAAAAGCTGTTCTTAAAGAAATGGACTACGATTGGTCCGATGATATGACTCATGTTCCTTTTGGCCTTGTAACAAAAGGAGGAGCAAAATTATCAACTCGTAAAGGAAATGTAATTCTCCTTGAACCTACTGTTGCAGAAGCTATTAATCGTGCGGCATCTCAGATTGAAGCTAAAAACCCTAACCTAGCAGATAAAGATAAAGTTGCTCAAGCAGTTGGTGTAGGTGCTATTAAATTTTACGATTTGAAAACTGATCGTACAAATGGTTATGACTTTGACTTAGAAGCAATGGTATCATTTGAAGGTGAAACTGGGCCATATGTACAATATGCACATGCTCGTATTCAATCAATCTTACGTAAAGCTAACTTTAACCCATCTAATAGCGATAATTACAGTCTCAACGATGTTGAAAGCTGGGAAATCATCAAACTCATCCAAGATTTTCCTCGTATTATTGTACGTGCGGCAGATAATTTTGAGCCCTCTATTATTGCAAAATTCGCTATCAATTTAGCTCAGTGCTTCAATAAATATTACGCCCACACACGTATTTTAGATGAAGACGCTGAAATCAGTAGTCGTCTAGCACTTTGCTATGCAACTGCTACAGTATTAAAAGAATCTCTTCGCCTCCTAGGAGTTGATGCTCCGAATGAAATG

SEQ ID NO: 22196 - protein, 563 aa, Streptococcus agalactiae; identical to SEQ ID NO: 12716

SEQ ID NO: 22197 - protein, 306 aa, Streptococcus agalactiae; identical to SEQ ID NO: 6425

SEQ ID NO: 22198 - protein, 102 aa, Streptococcus agalactiae; identical to SEQ ID NO: 3796

SEQ ID NO: 22199 - protein, 870 aa, Streptococcus agalactiae; identical to SEQ ID NO: 12719

SEQ ID NO: 22200 - protein, 290 aa, Streptococcus agalactiae; identical to SEQ ID NO: 12720

SEQ ID NO: 22201 - protein, 942 aa, Streptococcus agalactiae; identical to SEQ ID NO: 12721

SEQ ID NO: 22202 - protein, 314 aa, Streptococcus agalactiae; identical to SEQ ID NO: 3800

SEQ ID NO: 22203 - protein, 1749 aa, Streptococcus agalactiae; identical to SEQ ID NO: 12723

SEQ ID NO: 22204 - protein, 583 aa, Streptococcus agalactiae; identical to SEQ ID NO: 12724

SEQ ID NO: 22205 - protein, 1278 aa, Streptococcus agalactiae; identical to SEQ ID NO: 12725

SEQ ID NO: 22206 - protein, 426 aa, Streptococcus agalactiae; identical to SEQ ID NO: 12726

SEQ ID NO: 22207 - protein, 180 aa, Streptococcus agalactiae; identical to SEQ ID NO: 8645

SEQ ID NO: 22208 - protein, 60 aa, Streptococcus agalactiae; identical to SEQ ID NO: 3806

SEQ ID NO: 22209 - protein, 147 aa, Streptococcus agalactiae; identical to SEQ ID NO: 8643

SEQ ID NO: 22210 - protein, 49 aa, Streptococcus agalactiae; identical to SEQ ID NO: 3808

SEQ ID NO: 22211 - protein, 610 aa, Streptococcus agalactiae
ATGATCAAATGTTGTTACTTCAATAATCCTGTATTCTGGGACAGCCGTAGACTTACTTATTATCCTAATGTTATTTTTTGCCAAAAGAAAAAGCAGAAAAGACATCATTAACATCTATTTAGGACAATTTCTAGGCTCTGTTAGTCTAATATTCCTAAGTTTGCTTTTTGCATTTGTCTTAAATTATATTCCTAGTAAAGAGATTTTAGGTTTACTCGGTTTGATTCCAATTTTCCTAGGCCTAAAAGTTTTGCTTTTAGGAGATTCTGATGGAGAAGCTATTGCAAAAGATGGTTTGCGAAAAGACAATAAAAACCTGATTTTTCTAGTCGCTATGATTACTTTTGCAAGTTGTGGCGCTGACAATATTGGTGTCTTTGTCCCATATTTTACCACCTTAAATTTAGCGAATTTGATAGTGACTTTACTTACTTTTCTAGTCATGATTTATCTCTTGGTTTTTTCTGCACAAAAATTAGCACAAGTCCCTTCTGTTGGAGAAACTTTGGAAAAATATAGCAGATGGTTTATTGCCGTTGTCTATTTAGGATTGGGGATGTATATCCTGATTGAAAACAACAGCTTTGACATGCTATGGGCTGTGTTAGGC

SEQ ID NO: 22212 - protein, 204 aa, Streptococcus agalactiae
  VARIANT 2: Xaa = Any Amino Acid
MXQNVVTSIILYSGTAVDLLIILMLFFAKRKSRKDIINIYLGQFLGSVSLIFLSLLFAFVLNYIPSKEILGLLGLIPIFLGLKVLLLGDSDGEAIAKDGLRKDNKNLIFLVAMITFASCGADNIGVFVPYFTTLNLANLIVTLLTFLVMIYLLVFSAQKLAQVPSVGETLEKYSRWFIAVVYLGLGMYILIENNSFDMLWAVLG

SEQ ID NO: 22213 - protein, 336 aa, Streptococcus agalactiae; identical to SEQ ID NO: 12733

SEQ ID NO: 22214 - protein, 112 aa, Streptococcus agalactiae; identical to SEQ ID NO: 12734

SEQ ID NO: 22215 - protein, 1413 aa, Streptococcus agalactiae; identical to SEQ ID NO: 12735

SEQ ID NO: 22216 - protein, 471 aa, Streptococcus agalactiae; identical to SEQ ID NO: 12736

SEQ ID NO: 22217 - protein, 447 aa, Streptococcus agalactiae; identical to SEQ ID NO: 8501

SEQ ID NO: 22218 - protein, 149 aa, Streptococcus agalactiae; identical to SEQ ID NO: 8502

SEQ ID NO: 22219 - protein, 318 aa, Streptococcus agalactiae; identical to SEQ ID NO: 8503

SEQ ID NO: 22220 - protein, 106 aa, Streptococcus agalactiae; identical to SEQ ID NO: 8504

SEQ ID NO: 22221 - protein, 1098 aa, Streptococcus agalactiae
ATGACTTCACAATCTCGTGATGTGCTAAACCAATCTTACCTGCAATCTTACCTGCTCCAGAGCCTAAACATGGCTCTGGGGGCTTTAATGCAGGGAGAAACCAGCTACACCAATTCTTTTAATATTGTTATTCAAGCAGACGGCTTTATCTTTGTCCCTCGTCTACCATGTGCTTATATCCTTGATGATGACTTGTACAAGAAAATCTTTCTGATTGCCAATGCTTCACTTTATCCACAATATACGCTTCTAAAACAAAACGCTACCTATTTTGTCCCTCTAGAAACAGATGACTTACACACTCAGCGTGGATTATTTTTCCCTTGGAAAAAGGGAATTTCAGAACGTTTAGTCATTCCAGATTTGGATAAGTTTTCAGCTAGCTTGCCACAGGGGAAAATCCCTATCATGAAGTACTTTGAACTCAATTTAGATAAGGTTAATCACTGGGCTATTGCTGGAAATTCAGGTTCTGGGAAATCGTACGCTCTCACTTATTTCTTGAGTGTACTAAAGCATATGTCTGACTTGATTATCATTGACCCTAAATTTGATACCCCAAGTCGATGGGCAAGAGAAAATCACGTTGCTGTTATACACCCTGTTGAAAACCGTTCAAAATCAGATTTTGTCTCACAGGTCAATGAACAATTAAGTCAGTGTGCAACTCTCATTCAGAAACGACAAGCTATCTTGTATGATAATCCCAATCATCAATTTACCCATCTAACTATTGTTATTGATGAAGTCCTCGCTCTATCAGAGGGAGTCAATAAGAATATCAAAGAAGCCTTTTTCTCCCTACTCTCACAGATTTCCTTATTAGGACGTGCTACCAAAATCCATCTGTTTTTGGTAAGCCAGCGTTTTGACCACAATACTATTCCAATTTCAGTGAGGGAACAGCTAAACGTATTGTTGCAAATTGGAAATATCAATCAGAAAACTACTCAATTTTTATTTCCAGACCTAGACCCAGAGGGTATTGTTATTCCAATAGGACATGGGACAGGTATCATTCAAGTTATCGATAATGAACATCCCTACCAAGTTCTGCCCTTACTCTGTCCAACCTACTACACTAAACGAGGTATTCTA

SEQ ID NO: 22222 - protein, 366 aa, Streptococcus agalactiae; identical to SEQ ID NO: 17544

SEQ ID NO: 22223 - protein, 603 aa, Streptococcus agalactiae
ATGACCAATAAAACCTACTTTATGAGAAGTTTTAATCTCATACTATATTTATTTCTATTTGCACCTATCTGTTCTGCATTTGGATGGTTATTCAATTATCTTTCCGTTCAATTAACAAACATCACGTTTGTCAATTTAGATACGGTCAAAAGTATTACGGATATCATTAGTTCCGTTTGTCATGGATTTGCACTTATTTCTCTTCTACTTGCCTTATTTTTGGTTGGATTAGAAATAATACAACGGTTGAAAACAGATAGTCTTTGGAACTATATCCAATCTGTCTATCACACTTTTCTGTTGCGACACTTCCTGTTTCAGCGTGAACGAGTACAGAAGATAAGCAATCTTGAACATCAGACGGTTACTACTATCAACCCAATCCATAACGGATTTAACCGAGCTGTTCGTAAGTGTATCGTAGATATACGAAAAGATACCATCACTATTTTTCTAAAAGTCCCTAGAGACCAACAAGGGCAAAAAATCCTAAAAGAGATGGAAGCACAATTAAAAGAAGAAATCGTCAGCCAACACGCAGACTATTATTTCTCCTCTCCTATTCGAGTTCGTAACCAATTGTGGTTCACTGGACAAAAACGT

SEQ ID NO: 22224 - protein, 201 aa, Streptococcus agalactiae; identical to SEQ ID NO: 8508

SEQ ID NO: 22225 - protein, 603 aa, Streptococcus agalactiae; identical to SEQ ID NO: 12745

SEQ ID NO: 22226 - protein, 201 aa, Streptococcus agalactiae; identical to SEQ ID NO: 8510

SEQ ID NO: 22227 - protein, 246 aa, Streptococcus agalactiae; identical to SEQ ID NO: 8511

SEQ ID NO: 22228 - protein, 82 aa, Streptococcus agalactiae; identical to SEQ ID NO: 8512

SEQ ID NO: 22229 - protein, 1263 aa, Streptococcus agalactiae
ATGGAAACTGAAACAATTATTCATAATGGCAAAAAAGTCATTAAAAAAATCAAAAAAGATAAGTCCATCTCATACACTTTGAAGGGGACATTTCTGGGAAAAGATATCAAAACTGGTAAGCAAGTCACTACTACCATTACAGCCAAGACACTAAAACAGTTAGATAGAGCAATCATTCAAGCACGACTAGAATTTGAAAAAAATGGCTCAACACGAGAAAAAGTTATCGTCATTGATACACTGGAAGATTTAGCTGAAGAATGGTTTAAATCATATAAAACCTGGGTTAACTCGCATAATACTCTGAACAGAGTAAGAAGTTATCTTGATAATTATATTATCCCTAAATTTGGAGATTACAAACCAGATAAAATTGAATCTGCGGATATCCAGCTTTGGTTAAACGATTTGGCAAAGAAATCAAAAGAGTCCATTGAATCTGGTATAAAGCGTGCTGATAAAGGTAGTGCTAAAGATTTTGGTGCTGTTATCCATAAGTTGAAAGATATTTTTGACTATGGAATTACAAACTATGGACTAATCACTAATCCTGTTAGCACTGTTAAGATACCACCTAAGCCAAAATCAAATAAGCAACGCATCATGGTATTACATGATGATGGTCTTGTAATATGGCTTAATTATCTTGAAAGTTTAGATAACAATAGAGCCAATCGTAGATTTAAGTTAATTTGTAATACTCTATTAGCCTCCGCTTTGCGAATAAATGAATTACTTGCATTGACGATTGATGACCTAGATTTTGAAAATTCTTCTATTAACGTCAGTAAAACATTGATGTGGAAAACCGCAAATAAAAAAGATGGGACAAAAGGGGAAGTTATCTGTAAAGCTACACCAAAAACTGATGCAGGAAATCGCTCTGTCCCTGTCCCTCCCCCCATAATAGAAAAACTCAGAGATTTCCACCACGAAATGAACAAGTATCTTGAATTGCACAACAGACATAGAACAAAACTGATTTTCCCTACAATCTATGGGAACTATATGTGTGACAGAAACGAGAGAACAACTCTTAAGAAAAGGTTAGTAGGTCTTGGATTACCAAACTATGGTTTCCATTTATTCCGACATACTCATGCTTCAATGCTACTTAATGCTGGAACAAATTGGAAAGAACTCCAAGTCAGAATGGGACATAAATCCATTTCAACTACAATGGATACTTACGCTGAATTAGCACCACAACGAAAGTTAGAAGCTGTGGGGATTTATCTTGAAAAGATTGCTGAGCTAACGCAA

SEQ ID NO: 22230 - protein, 421 aa, Streptococcus agalactiae
METETIIHNGKKVIKKIKKDKSISYTLKGTFLGKDIKTGKQVTTTITAKTLKQLDRAIIQARLEFEKNGSTREKVIVIDTLEDLAEEWFKSYKTWVNSHNTLNRVRSYLDNYIIPKFGDYKPDKIESADIQLWLNDLAKKSKESIESGIKRADKGSAKDFGAVIHKLKDIFDYGITNYGLITNPVSTVKIPPKPKSNKQRIMVLHDDGLVIWLNYLESLDNNRANRRFKLICNTLLASALRINELLALTIDDLDFENSSINVSKTLMWKTANKKDGTKGEVICKATPKTDAGNRSVPVPPPIIEKLRDFHHEMNKYLELHNRHRTKLIFPTIYGNYMCDRNERTTLKKRLVGLGLPNYGFHLFRHTHASMLLNAGTNWKELQVRMGHKSISTTMDTYAELAPQRKLEAVGIYLEKIAELTQ

SEQ ID NO: 22231 - protein, 669 aa, Streptococcus agalactiae; identical to SEQ ID NO: 12757

SEQ ID NO: 22232 - protein, 223 aa, Streptococcus agalactiae; identical to SEQ ID NO: 12758

SEQ ID NO: 22233 - protein, 669 aa, Streptococcus agalactiae; identical to SEQ ID NO: 12759

SEQ ID NO: 22234 - protein, 223 aa, Streptococcus agalactiae; identical to SEQ ID NO: 12760

SEQ ID NO: 22235 - protein, 1362 aa, Streptococcus agalactiae; identical to SEQ ID NO: 12761

SEQ ID NO: 22236 - protein, 454 aa, Streptococcus agalactiae; identical to SEQ ID NO: 12762

SEQ ID NO: 22237 - protein, 1551 aa, Streptococcus agalactiae; identical to SEQ ID NO: 12763

SEQ ID NO: 22238 - protein, 517 aa, Streptococcus agalactiae; identical to SEQ ID NO: 12764

SEQ ID NO: 22239 - protein, 924 aa, Streptococcus agalactiae
ATGGCAAAAATTGTTGTTGCACTAGGAGGAAATGCCTTAGGAAATTCTCCAGAAGAACAATTAAGATTAGTAAAACATACTGCAAAATCATTGGTAGCCTTGATAAAAAAGGGACACGAAATTGTTGTAAGTCATGGTAATGGACCACAAGTTGGTGCCATTAATTTAGGAATGAATTTTGCGGCTGAGAGTGGTCAAGGAACTAATTTTCCTTTTCCAGAATGTGGAGCAATGAGCCAAGGATACATAGGCTATCATCTCCAACAGAGCCTTTTAAATGAATTACGTCAAGAAGGAATAAATAAGGAAGTTGCTACAATTATTACCCAAATTGAGGTGGATGAATCAGATCAAGCATTTAGCGCACCTACCAAGCCTATAGGTACCTTTTATGATAAGGAGACATCAGAAAAGATTGCTATAGAGAAAGGGTATACTTTTGTAGAAGACGCTGGACGAGGGTATCGTCGTGTTGTTGCTTCACCTGAACCTAAAAAAATCATCGAAATTAATAGCATTAAAACACTTATTGAAAATGATACCCTAGTTATCGCAGGTGGAGGTGGAGGCATCCCTGTCATTAATAAGGGAGGTTATGAAGGTATTGCAGCTGTTATTGATAAAGACAAATCTAGTGCACTGTTAGCAGGAGAACTAGCTGCGGATCAATTGATTATTCTCACTGCAGTTGATTATGTTTATACTCAATTTGGTAAAGAAAATCAAAAAGCTTTAACAGAGGTTAATGAGAATCAAATGATTGATTACGTTAACCAAGGTGAGTTTGCAAAAGGAAGCATGTTACCTAAAGTAATAGCCTGTATGAGTTTCTTAGATCACAATCCGAAAGGAACAGCCTTAATCACCTCATTAAATGGTTTAGAAGATGCATTAGATGGGAAATTAGGAACACGTATAACTAAG

SEQ ID NO: 22240 - protein, 308 aa, Streptococcus agalactiae; identical to SEQ ID NO: 3818

SEQ ID NO: 22241 - protein, 996 aa, Streptococcus agalactiae
ATGAAAAATTTACGTAACCGTAGTTTTCTTACTTTATTGGATTTTAGTACAGCAGAAGTTGAATTTCTTTTAAAACTTTCAGAAGATTTAAAACGTGCTAAATACGCAGGAATTGAACAACAAAAACTTGTTGGTAAAAATATCGCTTTGATTTTTGAAAAAGATTCTACACGGACACGTTGCGCTTTTGAAGTTGCTGCTCACGATCAAGGAGCTCATGTTACTTATTTAGGTCCAACAGGCAGTCAGATGGGTAAAAAAGAGACCTCAAAAGACACTGCGCGTGTGCTAGGTGGTATGTATGATGGTATTGAGTATCGTGGATTTTCTCAAGAAACAGTTGAGACTTTAGCCGAATTTTCAGGAGTTCCTGTGTGGAATGGTTTAACCGATGCTGATCATCCCACGCAAGTACTAGCCGATTTTCTGACTGCTAAGGAATGCTTACATAAGCCCTATAAAGATATTCGCTTTACGTATGTGGGTGATGGACGTAACAATGTCGCTAATGCCTTGATGATCGGTGCTTCTATTGTAGGCATGACTTATCATTTGGTTTGTCCTAAAGAATTAGAGCCAGATCCTGAACTACTCTCTAAATGTCAAGAAATTGCGAAAACTACTGGTGCTTCTATTGAAATCACTGATGATATTGCAGAAGGTGTCAGAGATTCAGACGTCCTATATACAGATGTTTGGGTTTCAATGGGAGAACCGGATGAAGTTTGGAAAGAAAGAATAGCTCTTTTAGAACCCTATCGTATTACCCAAGAAATGCTTAATATGACAGAAAATCCAAACGTTATTTTCGAGCATTGCTTGCCCTCATTTCATAATATAGATACTAAAGTTGGATACGACATTTATGAAAAATATGGTTTGAAGGAAATGGAAGTATCAGATGAAGTTTTTGAAGGCCCTCACTCAGTTGTTTTCCAAGAAGCTGAAAATCGTATGCATACTATTAAAGCAGTTATGGTAGCAACTTTAGGTGAT

SEQ ID NO: 22242 - protein, 332 aa, Streptococcus agalactiae; identical to SEQ ID NO: 12768

SEQ ID NO: 22243 - protein, 1293 aa, Streptococcus agalactiae; identical to SEQ ID NO: 12769

SEQ ID NO: 22244 - protein, 431 aa, Streptococcus agalactiae; identical to SEQ ID NO: 12770

SEQ ID NO: 22245 - protein, 831 aa, Streptococcus agalactiae; identical to SEQ ID NO: 12771

SEQ ID NO: 22246 - protein, 277 aa, Streptococcus agalactiae; identical to SEQ ID NO: 12772

SEQ ID NO: 22247 - protein, 720 aa, Streptococcus agalactiae; identical to SEQ ID NO: 12773

SEQ ID NO: 22248 - protein, 240 aa, Streptococcus agalactiae; identical to SEQ ID NO: 3824

SEQ ID NO: 22249 - protein, 1512 aa, Streptococcus agalactiae
ATGACAACACTAATCACTACCTTTCAAGAGCGTTTTGGAGATTGGACTCAAAGTCTTATTGAACACCTCCAGCTATCACTACTAACACTTATTTTAGCAACCTTAATTGCTATTCCACTCGGTATCATCATTAGTCATTATAAAAAAATCAGTCATGTTGTCCTTCAGATAACTGGGATATTTCAAACAATTCCTTCTTTAGCCTTGCTTGGTTTATTTATACCTTTTATGGGAATTGGAACTGTACCAGCTGTCGTTGCACTAATTATTTACGCTCTATTTCCAATTTTACAAAATACTGTAACAGCACTGATGCAAATTGATGCTAATCTCATTGAGGCAGCAACTGCTTTTGGAATGACACGTTGGGAAAGGCTTAAAAAGTTTGAGTTAGCTTTAAGTATGCCTGTTATCATCTCAGGCATTAGAACTGCCTCTGTTATGATTATTGGTACAGCTACATTAGCTAGTCTTATCGGAGCTGGTGGCCTTGGATCATTTATTTTGTTAGGGATTGATCGCAACAATCCTTCTCTAATTCTCATAGGGGCAATCTCTTCTGCTGTCTTAGCTATTATATTTAGTGGTTTAATTGGATTACTAGAAAAGGCTAGATTACGAACCATAGCCGTTTCTGGTATACTTTTACTAGCAGGCTTAGGACTATCCTATGCTCCAAAATGGATGCCTGGAACAAATACTGCAACGATAACTGTTGCAGGGAAGTTAGGAACTGAACCAGATATTTTAATTAATATGTACAAAGAACTTATTGAGGATCAGACAGATATCAAAGTTAAGCTTAAACCTAATTTCGGAAAAACAACTTTCTTATATCAAGCCCTAAAATCTGGTGACATTGATCTTTACCCAGAGTTTACAGGTACTATTACATCAAGTTTACTTAAAAATCCTCCTAAAGTAAGTAATAACCCTAAACAGGTTTACAACTTAGCCAAAAACGGTATTTTAAAACAAGATAAGTTGTCACTTTTGTCACCTATGGCTTATCAAAACACCTACGCTGTAGCTGTTAAAAAAGATTACGCTGAAGCTAATCAACTCAAAAATATCAGTGACCTAAAAAAATTAGATAAACTAAAAGCTGGTTTCACTTTAGAATTTAAGGATAGAGAGGATGGGAGTATTGGTTTACAGAAACATTATGGTTTAAACCTTGATATCTCAACCTTAGAACCTGCTTTACGATACCAAGCTATCAATAGTAAAGATGTCAATATTATTGACGCTTACTCTACCGATAGTGAATTAATCCAGTATCAACTTCAAATTCTCAAAGACGATAAGCATCTATTTCCGCCATATCAAGGAGCACCGCTACTAAGGCAAGATACGATTAAAAAATACCCTCAAGTAAAAAAAGCTCTCAATAAACTTGCTGGTCATATCACTGAAAAAGAAATGCAAGAAATGAACTACCAAGTAGCTGTAAAGCATAAATCAGCAGCTACAGTAGCTAAACAATATTTAAAAGCACATCATATTATAAAG

SEQ ID NO: 22250 - protein, 504 aa, Streptococcus agalactiae; identical to SEQ ID NO: 17572

SEQ ID NO: 22251 - protein, 2499 aa, Streptococcus agalactiae
GTGATTAAAATTGTATTTTTTATATCTGTTTTAGTGCTTATTATTGTTGAAATGATTCATTTGAAACGAACTATTTCTGTTGAGCAACTAAAGAGTGTTTTTGGGCAATTATCTCCAATGAATCTTTTCTTAATTATCCTTGTGGGGGTTATCGCTGTCTTACCGACAACCGGATATGACTTTGTACTGAATGGACTTTTACGTACAGATAAAAGCAAAAGGTATATTTTACAGACTAGTTGGTGTATCAACACTTTTAATAACTTGTCAGGATTCGGTGGCTTAATCGATATTGGGTTGCGCATGGCTTTTTATGGTAAAAAAGGTCAAGAGAAGAGTGATCTAAGAGAAGTGACTCGTTTTTTACCCTATCTTATTTCTGGTCTGTCATTTATTAGTGTGATTGCCTTAATCATGAGCCATATTTTTCATGCCAAAGCTAATGTTGATTACTATTATTTGGTATTAATTGGTGCTAGTATGTATTTTCCTGTTATTTATTGGATTTCTGGTCATAAAGGAAGCCATTATTTCGGAGATATGCCATCTAGTACTCGTATAAAATTAGGTGTTGTTTCTTTTTTTGAATGGGGATGTGCAGCCGCAGCATTTATAATTATCGGTTATTTAATGGGCATTCATCTACCAGTTTATAAAATTTTACCACTATTTTGTATTGGTTGTGCCGTGGGGATTGTATCCCTTATTCCCGGTGGATTAGGAAGTTTTGAATTAGTTCTATTTACAGGGTTTGCTGCCGAGGGACTACCTAAAGAAACTGTGGTTGCATGGTTATTACTTTATCGTTTAGCCTACTATATTATTCCATTCTTTGCAGGTATCTATTTCTTTATCCATTATTTAGGTAGTCAAATAAATCAACGTTATGAAAATGTCCCGAAAGAGTTAGTATCAACTGTTCTACAAACCATGGTGAGCCATTTGATGCGTATTTTAGGTGCATTCTTAATATTTTCAACAGCATTTTTTGAAAATATTACTTATATTATGTGGCTGCAGAAGCTAGGCTTGGACCCATTACAAGAACAAATGTTATGGCAGTTTCCAGGTTTATTGCTGGGGGTTTGTTTTATTCTCTTAGCTAGAACTATTGATCAAAAAGTGAAAAATGCTTTTCCAATTGCTATTATCTGGATTATTTTGACATTGTTTTATCTTAATTTAGGTCATATTAGTTGGCGACTATCTTTCTGGTTTATTTTACTATTGTTAGGCTTATTAGTCATTAAGCCAACTCTCTATAAAAAACAATTTATTTATAGCTGGGAAGAGCGTATTAAGGATGGAGTCATTATCGTTAGTTTAATGGGAGTTCTATTTTATATTGCAGGACTACTATTCCCTATCAGGGCTCATATTACAGGTGGTAGTATTGAACGCCTGCATTATATCATAGCATGGGAGCCGATAGCATTGGCTACGTTGATTCTTACTCTCGTTTATTTATGTTTGGTTAAGATTTTACAAGGAAAATCTTGTCAGATTGGCGATGTGTTCAATGTGGATCGTTATAAAAAACTACTTCAAGCTTATGGTGGTTCTTCGGATAGCGGTTTAGCCTTTTTAAATGATAAAAGGCTCTACTGGTACCAAAAAAATGGAGAAGATTGCGTTGCTTTCCAATTTGTAATTGTCAATAATAAATGTCTTATTATGGGTGAACCAGCCGGTGATGACACTTATATTCGTGAAGCTATTGAATCGTTTATTGATGATGCTGATAAGCTAGACTATGACCTTGTTTTTTACAGTATTGGACAGAAGTTGACACTACTTTTACATGAGTATGGTTTTGACTTTATGAAAGTTGGTGAGGATGCTTTAGTTAATTTAGAAACGTTTACTCTTAAAGGGAATAAGTACAAACCTTTCAGAAATGCCCTAAATAGAGTTGAAAAGGATGGTTTCTATTTCGAAGTTGTACAATCGCCACATAGTCAAGAGCTACTAAATAGTTTGGAAGAGATTTCTAATACTTGGTTAGAAGGACGTCCTGAAAAAGGTTTCTCATTAGGATATTTTAATAAAGATTATTTCCAACAAGCCCCAATAGCTTTGGTAAAAAATGCTGAACACGAAGTTGTTGCTTTTGCTAATATTATGCCAAACTATGAAAAGAGTATTATCTCTATTGATTTAATGCGTCACGATAAACAGAAAATTCCGAATGGCGTTATGGATTTCCTCTTTTTATCATTATTCTCTTATTATCAAGAGAAGGGATACCACTATTTTGATTTGGGGATGGCACCTTTATCAGGAGTTGGTCGCGTTGAAACAAGTTTTGCTAAAGAGAGAATGGCGTATCTTGTCTATCATTTCGGTAGTCATTTCTACTCATTTAATGGTTTACACAAGTATAAGAAGAAGTTTACACCATTGTGGTCGGAACGTTATATTTCTTGTTCTCGTTCGTCCTGGTTAATTTGTGCTATTTGTGCCCTATTAATGGAAGATAGTAAAATTAAGATTGTTAAA

SEQ ID NO: 22252 - protein, 833 aa, Streptococcus agalactiae
MIKIVFFISVLVLIIVEMIHLKRTISVEQLKSVFGQLSPMNLFLIILVGVIAVLPTTGYDFVLNGLLRTDKSKRYILQTSWCINTFNNLSGFGGLIDIGLRMAFYGKKGQEKSDLREVTRFLPYLISGLSFISVIALIMSHIFHAKANVDYYYLVLIGASMYFPVIYWISGHKGSHYFGDMPSSTRIKLGVVSFFEWGCAAAAFIIIGYLMGIHLPVYKILPLFCIGCAVGIVSLIPGGLGSFELVLFTGFAAEGLPKETVVAWLLLYRLAYYIIPFFAGIYFFIHYLGSQINQRYENVPKELVSTVLQTMVSHLMRILGAFLIFSTAFFENITYIMWLQKLGLDPLQEQMLWQFPGLLLGVCFILLARTIDQKVKNAFPIAIIWIILTLFYLNLGHISWRLSFWFILLLLGLLVIKPTLYKKQFIYSWEERIKDGVIIVSLMGVLFYIAGLLFPIRAHITGGSIERLHYIIAWEPIALATLILTLVYLCLVKILQGKSCQIGDVFNVDRYKKLLQAYGGSSDSGLAFLNDKRLYWYQKNGEDCVAFQFVIVNNKCLIMGEPAGDDTYIREAIESFIDDADKLDYDLVFYSIGQKLTLLLHEYGFDFMKVGEDALVNLETFTLKGNKYKPFRNALNRVEKDGFYFEVVQSPHSQELLNSLEEISNTWLEGRPEKGFSLGYFNKDYFQQAPIALVKNAEHEVVAFANIMPNYEKSIISIDLMRHDKQKIPNGVMDFLFLSLFSYYQEKGYHYFDLGMAPLSGVGRVETSFAKERMAYLVYHFGSHFYSFNGLHKYKKKFTPLWSERYISCSRSSWLICAICALLMEDSKIKIVK

SEQ ID NO: 22253 - protein, 741 aa, Streptococcus agalactiae; identical to SEQ ID NO: 17589

SEQ ID NO: 22254 - protein, 247 aa, Streptococcus agalactiae; identical to SEQ ID NO: 17590

SEQ ID NO: 22255 - protein, 354 aa, Streptococcus agalactiae
ATGTCTACTTTAACAATAATTATTGCAACATTAACTGCTTTGGAACATTTTTATATTATGTATTTGGAGACGTTAGCCACCCAGTCAAATATGACTGGGAAGATTTTTAGTATGTCTAAAGAAGAGTTGTCATATTTACCCGTTATTAAACTTTTTAAGAATCAAGATGTATACAACGGCTTGATTGGTCTATTCCTCCTTTATGGGTTATATATTTCACAGAATCAAGAAATTGTAGCTATTTTTTTAATCAATGTGTTGCTAGTTGCTGTCTATGGTGCTTTGACAGTTGATAAAAAAATCTTATTAAAACAGGGTGGTTTACCTATATTAGCTCTTTTAACATTCTTATTT

SEQ ID NO: 22256 - protein, 118 aa, Streptococcus agalactiae
MSTLTIIIATLTALEHFYIMYLETLATQSNMTGKIFSMSKEELSYLPVIKLFKNQDVYNGLIGLFLLYGLYISQNQEIVAIFLINVLLVAVYGALTVDKKILLKQGGLPILALLTFLF

SEQ ID NO: 22257 - protein, 2316 aa, Streptococcus agalactiae
ATGTTAGACGAATTAAAAGCAATCATAAAAAGCCCAAAATTATGGATTACGATGGCTGGGGTTGCACTGATTCCAACGCTATATAATGTTATCTTTCTAAGCTCAATGTGGGATCCTTATGGGAATACTAAAAATTTACCTGTGGCAGTCGTTAACCAAGATAAATCGGCTAAATTAAATGGAAAAACTATTTCAATTGGCAAAGATATGGAGGACAATTTGTCTAAAAATGATAGCTTAGATTTCCATTTTACAACGGCTAAAAGAGCAGAAAAAGAATTAGAAAAGGGTCACTATTATATGGTTATTACCTTTCCTAAAGACCTTTCTAGAAAAGCGACAACTCTCATGACAGAAAAACCAGAAAGGTTAAATATTACTTATAAAACTACTAAGGGGCGTAGTTTTGTAGCTTCAAAAATGAGTGAGACAGCAGCTAATAAACTAAAAGATGAGGTAGCAGAATCTATTACAGGGACTTATACTGAATCAGTTTTTAAAAATATGGGTTCTATGAAAACAGGTATCAATAAAGCTGCTGATGGGAGTCAAGAATTATTAAATGGTTCTAATAAGCTACAGGATGGCAGTCAAACCTTGACAAGTAATTTAGATGTTTTAGCAAGCTCTAGTCAAACTTTTTCTGGAGGAGCTAATAAACTAAATAGTGGAATAAACCTTTATACAGATGGTGTGGGGACCCTATCTAACGGGTTAGAAATGTTATCAGATGGTGTTACTGCTTACACAACAGGTGTGCATAAGTTGAGTGAAGGTAGTCAAAAATTAGATGATAAGTCTCAAGCATTGATGGAAGGATCAGAAAAGTTGACGGATGGTTTACAACAATTGTCACAAGCAACTCAACTAAAACCAGAGCAAGAACGTACTTTGCAGAACCTTTCAGATGGATTAAAGAATCTAAATCAGATTATTACAAATTTACAATCGACAGCAACTACTGATAGCGATACTAATAGTAAGTTATTTAATTTTTTATCAACTATTGAATCAAGTACAAAGGCTTTGATGAATACGGCTGCTGCTGATAAACAAAAGCAAATGACTGCGGTACAATCAACGTCAGCTTTTAAAAGTTTAACCCCTGAACAACAATCTCAAATTACCTCAGCGGTTACTGGAACACCTACTTCAGCTGAGACAATTGCAGCAAATATTTCTTCAAATATAGAAAATATGAAAACTGTGCTTAGTGAAGCATCTAGTTCAGCCCCTTCTAATAATAACTCACAAAATTTTCAAACTTTGTCAGGAACAGCTAACAATTTAGTATTAAAAGCTATCTCAGATTTAGATAAAATTCAAAAATTGCCAACGGCTACTAAGCAGTTATATCAAGGTAGTCAAACCTTGACAAAAGGAATCACGGATTATACGAATGCTGTAGGGCAATTACGCAAAGGTGCAGAAACTTTAGATAGTAAATCCAATCAATTGATTTCAGGAACACAAAAAGCAAGTCAGGGAGCTCAAACTTTAGATAGTAAATCGGATCAATTGAGAGATGGAGCGGGGCAATTAGCTAGTGGTTCTGATAGAATTGCAGATGGTTCTAATAAGCTTGCTGGGGGAGGACATCAGTTGACAGATGGGTTGACAGAGTTGTCAGGTGGTGTTTCTCAATTATCAAGTTCTTTGGGTAAAGCTGGGGACCAGTTGTCCATGGTTTCTGTAAACAAGGATAATGCCAATGCTGTATCTAGCCCAGTCACTATCAAGCATGAAGATTATGATAGCGTTGATACGAATGGTGTTGGAATGGCACCATACATGATTTCAGTTGCGTTGATGGTGGTAGCTTTATCAGCCAATGTTATTTTTGCGAAAGCTTTATCTGGCAAAGAGCCAGCTAATCGTTTTAGTTGGGCTAAAAATAAATTATTAATCAATGGATTCATTGCAACTCTAGCAGCAACTATCTTATTTTTTGCAGTTCAATTCATAGGTCTTAAACCAGATTACCCTGGAAAAACCTACTTTATTATCCTATTGACAGCATGGACTTTGATGGCATTAGTAACTGCTTTAGTGGGATGGGATAATAGGTATGGTTCCTTCTTGTCGTTATTAATATTATTATTCCAGCTTGGTTCAAGCGCAGGAACTTACCCAATAGAATTGAGTCCTAAATTCTTTCAAACAATTCAACCATTTTTACCGATGACTTACTCTGTTTCAGGATTAAGAGAGACCATCTCGTTGACGGGAGACGTTAACCATCAATGGAGAATGCTAGTAATCTTTTTAGTATCATCGATGATACTTGCTCTTCTTATTTATCGTAAACAAGAAGAT

SEQ ID NO: 22258 - protein, 772 aa, Streptococcus agalactiae
MLDELKAIIKSPKLWITMAGVALIPTLYNVIFLSSMWDPYGNTKNLPVAVVNQDKSAKLNGKTISIGKDMEDNLSKNDSLDFHFTTAKRAEKELEKGHYYMVITFPKDLSRKATTLMTEKPERLNITYKTTKGRSFVASKMSETAANKLKDEVAESITGTYTESVFKNMGSMKTGINKAADGSQELLNGSNKLQDGSQTLTSNLDVLASSSQTFSGGANKLNSGINLYTDGVGTLSNGLEMLSDGVTAYTTGVHKLSEGSQKLDDKSQALMEGSEKLTDGLQQLSQATQLKPEQERTLQNLSDGLKNLNQIITNLQSTATTDSDTNSKLFNFLSTIESSTKALMNTAAADKQKQMTAVQSTSAFKSLTPEQQSQITSAVTGTPTSAETIAANISSNIENMKTVLSEASSSAPSNNNSQNFQTLSGTANNLVLKAISDLDKIQKLPTATKQLYQGSQTLTKGITDYTNAVGQLRKGAETLDSKSNQLISGTQKASQGAQTLDSKSDQLRDGAGQLASGSDRIADGSNKLAGGGHQLTDGLTELSGGVSQLSSSLGKAGDQLSMVSVNKDNANAVSSPVTIKHEDYDSVDTNGVGMAPYMISVALMVVALSANVIFAKALSGKEPANRFSWAKNKLLINGFIATLAATILFFAVQFIGLKPDYPGKTYFIILLTAWTLMALVTALVGWDNRYGSFLSLLILLFQLGSSAGTYPIELSPKFFQTIQPFLPMTYSVSGLRETISLTGDVNHQWRMLVIFLVSSMILALLIYRKQED

SEQ ID NO: 22259 - protein, 537 aa, Streptococcus agalactiae
ATGGTAAACGATACGAGGAGAGAAAAAACAAAAAGAGCTATTGAAGCAGCTATGATTACGTTATTAAAAGATCAGAGCTTCGATGAAATTTCAACGATTAATCTAACTAAAACAGCTGGAATCAGTCGTTCTAGTTTTTATACTCATTATAAAGATAAATATGAAATGATTGATCAATACCAACAGTCACTCTTCAATAAAGTCGAATATATTTTTGATCGCAATCAATTTAAAAAAGAAGATGCCTTGCTCGAAATTTTTCAATTCTTAGATAGAGAATCATTATTTGCTGCTCTCTTAACCCAAAATGGAACAAAAGAAATTCAGACCTACATCCTTAATAAATTACAATTAATGCTTTCTAAAGAATTACCTGAGGTCAATCCAGATGCAACAAAGTCTGATATCAACCGTTTGTATTATAGTGTCTATCTCAGTCATGCTATTTTTGGAGTCTATCAAATGTGGATAACACGGGGAAAAAAAGAAAGCCCTCAACAAATTACACAAGTGCTACTCAGTTTATTACCTCAAACT

SEQ ID NO: 22260 - protein, 179 aa, Streptococcus agalactiae; identical to SEQ ID NO: 12790

SEQ ID NO: 22261 - protein, 247 aa, Streptococcus agalactiae
ATGGATCTAAATGATAGATTAAAAATAGAAGAAATGGAAGAGAAATATGATAGCTTCAAACCTAGAATCAATGCATTAGTAGAAGCTATAGATGATTTTCAAAAGCACTATGAAGATTACGTGAAATTAAGAGAATTTTATGGTAGCGAAGACTGGTTTAGACTATCAGAACAAACAGAAAATAATCTCAAATGCGGTGTACTGAGTGAGGATCAGCTCTTTGATTTTATAGGACATAACGAGCTTG

SEQ ID NO: 22262 - protein, 83 aa, Streptococcus agalactiae
MDLNDRLKIEEMEEKYDSFKPRINALVEAIDDFQKHYEDYVKLREFYGSEDWFRLSEQTENNLKCGVLSEDQLFDFIGDITSL

SEQ ID NO: 22263 - protein, 690 aa, Streptococcus agalactiae
ATGAAACTTTATGTAGATGAATCGGGGACAATAACAGAAAGTAAACATCCTCATCTAAGATTTTTTATAATTTGTTTAGTTGAATGCAACAATCATAACAAGGCTATACGTGAATTTAGAAAAGCAAAAAAAGATTATATAAAATCGAATCCAGACTGTGGCTTCAGTATAAAAGATGAAATCAAAGGTTCCGAAATGCCTTATGGGATGAAAAAACTTATCTTTGAACGTTTAAGAGATAGAACAGATATTGTTTTTCATTATAAAATAATTGATAATCATAATCTTCATCAAAGCTTAAAAAAATCACCTTCTATATCATTTAACTACTTTATTGGACTTACACTAAAAAAGATTTTTAATGAGTCCGAAATTCAGCACGACAGTCTATATATGTTGATTGATGAAAGAAATCAATCTGTTGAATCACTTAATAGTTTAGAAGAGTATTTAAAAATTGAACTTTGCATAAAGAATAACCATACCCAAGATGTAATTGTGAAATATAAAGATTCACAAACTAAGGACTTAATACAAATTTCAGATATTTTTGTTAATACTGTATTTAGAATTTGTAAAGGATATGCCCTAGACAATATTGATAAAAAAAATAGAAAATTACTGTCTATTTGTAACATTAGAACTAATGATTACTTTCCTAAATACAAAAATGATTTAGATATTTGTAAA

SEQ ID NO: 22264 - protein, 230 aa, Streptococcus agalactiae
MKLYVDESGTITESKHPHLRFFIICLVECNNHNKAIREFRKAKKDYIKSNPDCGFSIKDEIKGSEMPYGMKKLIFERLRDRTDIVFHYKIIDNHNLHQSLKKSPSISFNYFIGLTLKKIFNESEIQHDSLYMLIDERNQSVESLNSLEEYLKIELCIKNNHTQDVIVKYKDSQTKDLIQISDIFVNTVFRICKGYALDNIDKKNRKLLSICNIRTNDYFPKYKNDLDICK

SEQ ID NO: 22265 - protein, 225 aa, Streptococcus agalactiae
ATGTATAACGAAGAAATTGCAAAGATGATTTTATCATTTGAAAAAGACGATTGTCGTCCTGAAGGTTTTAATTGGGATGATTTTGAAGTAACAGCTAAACAATTAATCGCTAGTGGTCAAATTGATGGAAAACTAAAATTTGATTATTTAAGCCCTTATTTAGATTTATTGTATCAAAAACAGCATACTCAGCGAAAAGTTGTTTCTTTTTCAGAAATCGCAAAA

SEQ ID NO: 22266 - protein, 75 aa, Streptococcus agalactiae
MYNEEIAKMILSFEKDDCRPEGFNWDDFEVTAKQLIASGQIDGKLKFDYLSPYLDLLYQKQHTQRKVVSFSEIAK

SEQ ID NO: 22267 - protein, 156 aa, Streptococcus agalactiae
TTGGAGAAGAAAAAAGCAGATAAATGCTCTCCTATGGATCATCAGTTCTCTGCTTCATATCATATTGACCTTTATTTCGGAAATAAGTTACGCTTTTCAATCTCTTTAGATAGTTCTTTAGCGAACTTCTCAGATAGCAAAGCTTCGCTCATCGGC

SEQ ID NO: 22268 - protein, 52 aa, Streptococcus agalactiae
MEKKKADKCSPMDHQFSASYHIDLYFGNKLRFSISLDSSLANFSDSKASLIG

SEQ ID NO: 22269 - protein, 183 aa, Streptococcus agalactiae
ATGGATTTTTCTGATTTTTTGAATAAAACACAAAAAGAATGGGATGAATCTCATCCAATTCCTGACTTTAGTGCAATGAGTGATGAAGAGTTGCTTTATCAGCCGATGAGCGAAGCTTTGCTATCTGAGAAGTTCGCTAAAGAACTATCTAAAGAGATTGAAAAGCGTAACTTATTTCCGAAA

SEQ ID NO: 22270 - protein, 61 aa, Streptococcus agalactiae
MDFSDFLNKTQKEWDESHPIPDFSAMSDEELLYQPMSEALLSEKFAKELSKEIEKRNLFPK

SEQ ID NO: 22271 - protein, 360 aa, Streptococcus agalactiae
ATGAGCGCTAAAGAACAACTTAAAGAATTGAAACCACTTTTCGCTTTAATAACCTTATTTGAGGAACAACGAGACAAGGACATCAAGCTGATGAATGCTTTTCGTAATCCTGAGTTACTAAATGGCATTGAAAAAGGTACTGCACAGCAACTCTTATGTTTGGCAAAAGAACGTGACAAGAGGCTAGCCATGATTACCTCCCTACAAGATGAGAAGCAGATAGCTGTTATTAAGGCTAGATATGTGGATGACTTATCATGGGACGAGATACCAGATAAAGTAGGTTGTTCAAGGAATACTGTTTTCAAACTACATAGAGACGCTTTAGAGGTGTTAGATGAGCAAGAAGAACGCCATGCG

SEQ ID NO: 22272 - protein, 120 aa, Streptococcus agalactiae
MSAKEQLKELKPLFALITLFEEQRDKDIKLMNAFRNPELLNGIEKGTAQQLLCLAKERDKRLAMITSLQDEKQIAVIKARYVDDLSWDEIPDKVGCSRNTVFKLHRDALEVLDEQEERHA

SEQ ID NO: 22273 - protein, 555 aa, Streptococcus agalactiae
ATGAGAACATTTTCAGATACACCTAAAACATTTACATTTCACTATACTTTTAGAGACTTTGACACTGCACAAGTAGCTTGTCATGCTATCTTAGGTTACATGACTGGTACTTATGAGCAACCAGTGATTGACGCAACTTATCACAATGATGACCAAGGTGGTCATGCTAATCAGTTAGTCTTAAAATATGCTGAAGATAGAAAGTTAAGCAAGGTCTTCAAGCGTATCTGTGACAGTTTCAAGGACTATTACAACCAACCTGAGGATATGACGGATGAAGAACTTGATGACATGGCTCAGGAAAATGAATTAATTAAGGAAGTTGAAGAACTTGATGATCAGCGCGTGGTTCCTTTATTTGAGATTACTCAAGAGGAAGCTAATGAACAAGACACACTCATGGCTTTCATCTCAGACCATGACCAACTAGCTGAACATCTCTCTATGAATTATCAGGAGATGAGCCAAGACGATTTAGGAGCTATCCTTGAAACTATCAGTCAAGCCTTTAACCATTTGTATGATATGGTTGTTGAAGGTCAGTTACTCGTTAAA

SEQ ID NO: 22274 - protein, 185 aa, Streptococcus agalactiae
MRTFSDTPKTFTFHYTFRDFDTAQVACHAILGYMTGTYEQPVIDATYHNDDQGGHANQLVLKYAEDRKLSKVFKRICDSFKDYYNQPEDMTDEELDDMAQENELIKEVEELDDQRVVPLFEITQEEANEQDTLMAFISDHDQLAEHLSMNYQEMSQDDLGAILETISQAFNHLYDMVVEGQLLVK

SEQ ID NO: 22275 - protein, 819 aa, Streptococcus agalactiae
ATGATCAGTAAAACTGTCACCCAAACGCAAAGATTTTTACAAATGCCATTAGAGGCGCAAGCTTTATACTTTCATCTAATTCAGAATGCTGATGATGACGGAATTGTCGAGGCTTTTCCGATTGTAAGAATGATTGGAGCTAATGAAGATAATTTAAAACTGCTACAAGTTAAAAACTTTGTAAAACCTCTAAATGAAGAAATGGTATATTTCATTATTGATTTTTTCGAACAAAATCAGATTAAATCAAACCAATATAAAAAAAGTATTTATCAATCATTGCTGAGCGAGGAAGACAAGGTCAATAATTTACGTATTCTTGAAGAGTTCAAAAATGGTTCAAAAGTTGAACAAGTTTTGAACCCCAATATAAGTCAAGATAATCAAATTAAATCAAAGATAATTAAATCAAAGATAATCAAAGATAATCAAATCAAAAATAATATAAGTGAAGATAAGATAGCGTCAAATCAAAAGAATAATTTTGACACTGATAATCTCAAATCTATGACAAATATTCTAGGAGATAACTTCAAAACTAATTGTGACGATGAAACATTGATTACAAATTTCACCGAATACTACTTAGGACGTGTTCCAGATAACTATGAACTCAATACTTTAAAGAAAAGACTGAGAAACATTGATAGACAACTTTTCGAAGTTGCTTATCAGCAAGCGAGTATAAACGGAGCTGATACTCTTGGATATATAGTTACTACTCTAGATAATTGGGAACGACTAGGAATCACAACTTATAATAAATGGTCAGAACACGAAGGAAGAAGAAGTGAGGAATTAGAAGATGAATTACCCTTC

SEQ ID NO: 22276 - protein, 273 aa, Streptococcus agalactiae
MISKTVTQTQRFLQMPLEAQALYFHLIQNADDDGIVEAFPIVRMIGANEDNLKLLQVKNFVKPLNEEMVYFIIDFFEQNQIKSNQYKKSIYQSLLSEEDKVNNLRILEEFKNGSKVEQVLNPNISQDNQIKSKIIKSKIIKDNQIKNNISEDKIASNQKNNFDTDNLKSMTNILGDNFKTNCDDETLITNFTEYYLGRVPDNYELNTLKKRLRNIDRQLFEVAYQQASINGADTLGYIVTTLDNWERLGITTYNKWSEHEGRRSEELEDELPF

SEQ ID NO: 22277 - protein, 165 aa, Streptococcus agalactiae; identical to SEQ ID NO: 17617

SEQ ID NO: 22278 - protein, 55 aa, Streptococcus agalactiae; identical to SEQ ID NO: 17618

SEQ ID NO: 22279 - protein, 339 aa, Streptococcus agalactiae
ATGACACTACCAGAGAATTATAGACGTGTCCTTAATCTGATCAAGGTTGGAGCAGACAATCCTATCACAGGGGCAGAGATTGGCTTAATACTGAAACTTGAAGAACGTTCAATCCAAAGTATCATCAGTAGCTTAATCACTCGCTATAACGTCCCTATTGTCGCTATAAGACATGGGTTTAATCGTGGCTACTTCATCCCAGCTAATAAGGAAGAATTACTAGAGGGGGCCAAAGCCTTTTATAACCAAGTACAAAAAGAACAAGAACGTTTGTCTGTATTAATGAATGCGGATCTAGAGAGTTATAAGAAGTTACTGAAGGAGGCTGATATGAATGTT

SEQ ID NO: 22280 - protein, 113 aa, Streptococcus agalactiae
MTLPENYRRVLNLIKVGADNPITGAEIGLILKLEERSIQSIISSLITRYNVPIVAIRHGFNRGYFIPANKEELLEGAKAFYNQVQKEQERLSVLMNADLESYKKLLKEADMNV

SEQ ID NO: 22281 - protein, 360 aa, Streptococcus agalactiae
ATGACAACGGAAGAATATTTTAAAAAATTGCTAGAAGATAGCGAAAAACATCCTACAAACTGGTTGAGTGATAGGGTTTTAGACAAAAATATCAAAATGCTAGATGAAGATATTGAAGCAGAGTGGGACGATTTTCCGTTATTCACGAAAAAAATATTTATCAATACTACGCAACGTGACTATAACAAAGCTGATGCCGTTGTTAAATTTTTGGAATCAATACCAATAGAGATGGAATATAAAAAAGGGCTAAATATAGTTATACAAGCATTGAACGAGTTAAAAGATAGTCTTAAAAATCAAGTGCTTGGTGTTATTGATAACCAAATCCTGTTTCCAAATGATAAGGAGGACACGAAA

SEQ ID NO: 22282 - protein, 120 aa, Streptococcus agalactiae; identical to SEQ ID NO: 17622

SEQ ID NO: 22283 - protein, 189 aa, Streptococcus agalactiae
ATGCAAGAACTTAACCTCACACCAACACAGACACTTATTTTATTCATTGTTTTAGGTCTCTTAGGGCTTCTCCTTAGCCTTTCTAAGCCATTAATAGAGATTGACTTACCAGAAGATCGCCAAACACCTAAACCACGTCAGAACGCAAACTATGGGGCTTATATTCAATCACAGAACCATTATTACAAT

SEQ ID NO: 22284 - protein, 63 aa, Streptococcus agalactiae
MQELNLTPTQTLILFIVLGLLGLLLSLSKPLIEIDLPEDRQTPKPRQNANYGAYIQSQNHYYN

SEQ ID NO: 22285 - protein, 329 aa, Streptococcus agalactiae
ATGAATATAGAGTAGAAACAAATCCTTTTTCAAAAGATAGATACACTCCTGAACAGCTAGAAATGTTCAAAAATCGCCAACTCAGCAAAGATAAAGCTGAAGCATATTTCACTCGACTATATAGCCAACATATTGCTCGGGTGATTATTGCTAATGTTATGACAGAATACGTCATTAAATTCAGAAAAAGTGCCACCAGCTTTGAAGAAGCATGGGAAGCTTTAGACTATCAACGAACTACAGAGATTGTCTTTAGAGCCGTTAACGGTTTACCTTGTTCAGAGAAAGGCACAGGGGAATTAGAAACTTATTTAAGTGAGGTATCGGCA

SEQ ID NO: 22286 - protein, 110 aa, Streptococcus agalactiae
  VARIANT 2: Xaa = Any Amino Acid
MXYRVETNPFSKDRYTPEQLEMFKNRQLSKDKAEAYFTRLYSQHIARVIIANVMTEYVIKFRKSATSFEEAWEALDYQRTTEIVFRAVNGLPCSEKGTGELETYLSEVSA

SEQ ID NO: 22287 - protein, 197 aa, Streptococcus agalactiae
ATGGCTAACAAGGAGTTAAAAGAGCAAGGACTCATTTATAAAGCTAACATTTACTATGAACAAGTGGTCTCAACATCCGAAATTATAGAAGACATTAAACCAAAACACAAGATAGAATTAAAGCCATCCACTTACAACAAAAAGCGCTAGAGCGTATTCCTAGCGAGTTATTTGCAGAATTATACACTAACATGAAC

SEQ ID NO: 22288 - protein, 66 aa, Streptococcus agalactiae
  VARIANT 33: Xaa = Any Amino Acid
MANKELKEQGLIYKANIYYEQVVSTSEIIEDIXTKTQDRIKAIHLQQKALERIPSELFAELYTNMN

SEQ ID NO: 22289 - protein, 183 aa, Streptococcus agalactiae
ATGCGTCTCGATAAACAGAAAATTCTGAATGGCGTTATGGATATCCTCCAAGTATCATTATTCTCATATTATCAAGAGAAGGGATACCACTATTCTGATTTGGGGATGGCACCTTTATCAGGAGTTGGTCGTGTTGAAACAAGTTTTGATAAAGAGAGAATGGCGTATCNNNNNTTAATTAAT

SEQ ID NO: 22290 - protein, 61 aa, Streptococcus agalactiae
  VARIANT 57, 58: Xaa = Any Amino Acid
MRLDKQKILNGVMDILQVSLFSYYQEKGYHYSDLGMAPLSGVGRVETSFDKERMAYXXLIN

SEQ ID NO: 22291 - protein, 321 aa, Streptococcus agalactiae
ATGGGAGTTCTATTTTATATTGCAGGACTACTATTCCCTATCAGGGCTCATATTACAGGTGGTAGTATTGAACGCCTGCATTATATCATAGCATGGGAGCCGATAGCATTGGCTACGTTGATTCTTACTCTCGTTTATTTATGTTTGGTTAAGATTTTACAAGGAAAATCTTGTCAGATTGGCGATGTGTTCAATGTGGATCGTTATAAAAAACTACTTCAAGCTTATGGTGGTTCTTCGGATAGCGGTTTAGCCTTTTTAAATGATAAAAGGCTCTACTGGTACCAAAAAAATGGAGAAAATTGCGTTGCTTTCNNNNNT

SEQ ID NO: 22292 - protein, 107 aa, Streptococcus agalactiae
  VARIANT 106, 107: Xaa = Any Amino Acid
MGVLFYIAGLLFPIRAHITGGSIERLHYIIAWEPIALATLILTLVYLCLVKILQGKSCQIGDVFNVDRYKKLLQAYGGSSDSGLAFLNDKRLYWYQKNGENCVAFXX

SEQ ID NO: 22293 - protein, 616 aa, Streptococcus agalactiae
TTGAGAACAGAAACATGGAATGGATATGATATCCGATTTGTAGAGCACCAAGGCGAATGGTGGGCAGTTCTTGCTGATATTTGTCACGCGCTAGACTTAAAACCAAAACGTGTGAAAGAGCGTTTAGTTGATGAGGTCGTTTCAACCGACCACGTCGCAGACAGTTTAGGACGTCAACAAGAAATGCTAATTGTTAACGAGTTTGGAATTTATGACACTATTTTTTCAAGTCGTAAACCAGAAGCAAAATCATTTAAGTTTTGGGTATTTGAAACCATTAAACAGTTAAGACAAAGCACAGGCCTAGAGGGCTTCCAAGTATTTAGAATGTTTGATAAAGAACATCAGAAGCAGGCAATGAATAGGCTTGTCGATGGCTTACAAAATGCAACTAAGAAAGACCTTATCAAAGCAAACACTATCGCAAACAAAGCCGTTTCGGACCTATATGGTTATCCTAAGATGATTAGTAAAAACGAGATGACAGAAAACATGTTGCGAGACGAAGCCTATCCTTGATGAAACGGTTGAACTAATCAAGGTTAAAGAAAAATACGGCTTAAATTTTAGTGTATCTGAAGCTATCTATAACCAAAACACAATAAAAAAAGCGCAG

SEQ ID NO: 22294 - protein, 206 aa, Streptococcus agalactiae
  VARIANT 169: Xaa = Any Amino Acid
MRTETWNGYDIRFVEHQGEWWAVLADICHALDLKPKRVKERLVDEVVSTDHVADSLGRQQEMLIVNEFGIYDTIFSSRKPEAKSFKFWVFETIKQLRQSTGLEGFQVFRMFDKEHQKQAMNRLVDGLQNATKKDLIKANTIANKAVSDLYGYPKMISKNEMTENMLRDXKPILDETVELIKVKEKYGLNFSVSEAIYNQNTIKKAQ

SEQ ID NO: 22295 - protein, 612 aa, Streptococcus agalactiae
ATGAATAGGTTGAAAGAATTACGCAAAGAAAAAAAGCTAACCCAAGAAGAATTAGCTGGGGAGATTGGTGTATCAAAAATCACTATTCTCCGTTGGGAAAACGGCGAAAGACAAATAAAGCCTGACAAAGCAAAAGAATTAGCAAAATATTTTAATGTATCAGTTGGATATTTACTAGGTTATGCTCCTAATAAAAAGATTGATTTTCAGCTAAATTTAGATGGTACAACCCTCCATCTAACCAAAGAACAGTTTTTGGCTTTAGAAAACACCTCGAAAAGCATAAAAAAAATAAAAAATACCATCAATGAATCTGTTAAACAAGAAGAATATATAAAAAATGCTTCAAAATATTATGATTTTGAAAAAGTCAGCAGAAGACTTACGGACAGACTTTTTGAAATACATACTGACCTTATTGAGCTATTGATGATGTTAGACCACTTCCCAAGTGGTGAACTTTCCAAAAGTCAACAAGAAGCTATTTTCAAATTTTATAAACAATTAGATTATTTTGTGACTGATACCCCCGCTAGTTTTGATTATTTTAAAAAAAATTTGGAGTCCTACGGATATAAAATCTATACTGAGGGAGATAAGATAGATTTTGAT

SEQ ID NO: 22296 - protein, 204 aa, Streptococcus agalactiae
MNRLKELRKEKKLTQEELAGEIGVSKITILRWENGERQIKPDKAKELAKYFNVSVGYLLGYAPNKKIDFQLNLDGTTLHLTKEQFLALENTSKSIKKIKNTINESVKQEEYIKNASKYYDFEKVSRRLTDRLFEIHTDLIELLMMLDHFPSGELSKSQQEAIFKFYKQLDYFVTDTPASFDYFKKNLESYGYKIYTEGDKIDFD

SEQ ID NO: 22297 - protein, 99 aa, Streptococcus agalactiae
ATGAAAATAGCTCATGAATTACCAAATTTCCCGACGTTGGGAAATATCGGAACAGAAGCTCTCTACCTTATTGCCACCCTACCAGATAACCAAAAGCAG

SEQ ID NO: 22298 - protein, 33 aa, Streptococcus agalactiae; identical to SEQ ID NO: 3838

SEQ ID NO: 22299 - protein, 963 aa, Streptococcus agalactiae
ATGGAGAATTTAAGTACAAGGTTAGTTGATAAAAGTATTGAAGCTTTTATTATGGGACTTGAAATATACAATAAACCAACGATTAAGTACCGAATTGAGGGCTTTAGTTTCTTTATTTGTAATGCTTGGGAATTGATGCTTAAAGCTGAAATGTTAAATCGTAATCAATCTATCTATTTTAAGGATAATCCTGATAGAACACTAAGCTTAGAAGGTGTTATAAAAAAAATATACTCGGACAACAGCACTAGAATTCGACTTAATCTTGAGCGCATTATTGAACTAAGGAATATTAGTACTCACTACATAACAGAAGATTATGAATTAAAGTATGCTCCACTTTTCCAAGCTTGTGTACTTAACTATGTCAATGAACTTCAACGATTTCATTCAAGAGACGTTACAAAGGCCATTTCCCAAAATTTTTTAACTATCACTGCAACTTACGAACCATTATCTAACGAACAAATTAGATTAAAATATCCTGCGGAAATTGCTGAAAAATTCATCCAACAGGCAAATGCCATAGATGTCTTAGTGACAGAGTATAATTCTGATAAATTCGCTATTGGTGTTAAACAAAATCTTTATATTACTAAGAAAAAATCTGAAGCTGATTTTATAGTATCAATTGCAAATCAATCACCTTCTCAAGTTGCTATTTTAAAAGATTTGAAAGATCCATCAGAAACGCACAAGTATTCATATGCAAATATTATATCTGTTGTAAACGATAGACTAAATAAAAAGAATATTAAACTTAATTATAAATCTGGTTTTAATCAATATGTCCTAACATTAGTGATTGATTTCTATTCAATAAAGTCTGATGAAAAATATTCTTATTGCCATAAAATAGGTAAATCTGAACACTACACTTATTCTCAAAAATTCGTTGATTTTATTATCTCTGAAATAGAAAAAGACCCTCAACATTTTGTTGAAAGTCTGAAAAAATCTAAA

SEQ ID NO: 22300 - protein, 321 aa, Streptococcus agalactiae
MENLSTRLVDKSIEAFIMGLEIYNKPTIKYRIEGFSFFICNAWELMLKAEMLNRNQSIYFKDNPDRTLSLEGVIKKIYSDNSTRIRLNLERIIELRNISTHYITEDYELKYAPLFQACVLNYVNELQRFHSRDVTKAISQNFLTITATYEPLSNEQIRLKYPAEIAEKFIQQANAIDVLVTEYNSDKFAIGVKQNLYITKKKSEADFIVSIANQSPSQVAILKDLKDPSETHKYSYANIISVVNDRLNKKNIKLNYKSGFNQYVLTLVIDFYSIKSDEKYSYCHKIGKSEHYTYSQKFVDFIISEIEKDPQHFVESLKKSK

SEQ ID NO: 22301 - protein, 1169 aa, Streptococcus agalactiae
ATGATCATGAAAATAACTGAAGTAAAAAAGAAAGATGGTACGGTAATTTATCGTGCCAGTATTTATCTTGGTACTGATAAAGTAACAGGTAAAAAAGTAACTACTAAAATAACAGGACGAACTAAGAAAGAAGTTAGAGAAAAAGCTAAGCAAGAAGCTGTCGAGTTTATAAAAAATGGTTCTACTCGCTTCAAAGCTACTTCCGTAAAAGTTATCAGGAACTTGCAACCTTATGGTGGGATAGTTACAAACATACCGTAAAATACAATACTCAGCTAGCTACTGAAAAGCTGTTAACCGTTCATGTCATACCAATTTTTGGAGCATATAAGCTTGATAAGTTAACGACACCACTTATACAGTCTATCATCAATAAACTAGCTGATAAAACTAATAAAGGAGAAAGAAAAGCTTACCTCCATTATGACAGAATACACGCGCTAAATAAACGTATACTACAGTATGGCGTTATCATGCAAGCTATACCATTCAACCCTGCGCGTGAGGTCATTCTCCCTCGCAACACTAAGAAAGCTAACACTAAAAGAGTAAAGCATTTCGAAAATGATGAACTCAGAACATTTTTCAACTACTTAAACAATCTAGATAAAAGTAAATACAGATACTTCTATGAAGTCACACTTTATAAGTTTTTATTAGCTACAGGTTGTCGCATTAATGAAGCGTTAGCTCTAAACTGGTCAGATATCGACTTGGATAATGCCGTTGTTCATGTCACAAAAACGCTAAATTACAAGCAAGAAATTAATAGTCCAAAGTCAAAGTCAAGCTATCGTGATATTGACATAGATAGTCAAACAGTTACAATGATTAAGCAGTATAGACGACGACAGATTCAAGAAGCATGGAAGTTAGGGCGTTCAGAAACAGTAGTATTTTCTGATTTTATCCATAAGTACCCCAACAATAGAACCTTACAAACTCGATTAAGAACACATTTTAAAAGAGCAAATGTATCGAATATAGGCTTTCATGGTTTTCGTCACACTCACGCTAGTTTATTGCTGAACACAGGTATCCCCTACAAAGAACTCCAATATAGATTAGGGCACTCTACTCTATCTATGACTATGGATATTTATAGCCATTTATCAAAAGAGAATGCAAAAAAAGCTGTCTCATTCTTTGAAACAGCAATTAACTCAATA

SEQ ID NO: 22302 - protein, 390 aa, Streptococcus agalactiae
  VARIANT 70: Xaa = Any Amino Acid
MIMKITEVKKKDGTVIYRASIYLGTDKVTGKKVTTKITGRTKKEVREKAKQEAVEFIKNGSTRFKATSVXSYQELATLWWDSYKHTVKYNTQLATEKLLTVHVIPIFGAYKLDKLTTPLIQSIINKLADKTNKGERKAYLHYDRIHALNKRILQYGVIMQAIPFNPAREVILPRNTKKANTKRVKHFENDELRTFFNYLNNLDKSKYRYFYEVTLYKFLLATGCRINEALALNWSDIDLDNAVVHVTKTLNYKQEINSPKSKSSYRDIDIDSQTVTMIKQYRRRQIQEAWKLGRSETVVFSDFIHKYPNNRTLQTRLRTHFKRANVSNIGFHGFRHTHASLLLNTGIPYKELQYRLGHSTLSMTMDIYSHLSKENAKKAVSFFETAINSI

SEQ ID NO: 22303 - protein, 609 aa, Streptococcus agalactiae
ATGTCACGTTATACTGGTCCATCATGGAAACAATCACGTCGCCTTGGTTTATCACTTACAGGCACAGGTAAAGAATTGGCACGTCGTAACTACGTACCTGGTCAACACGGTCCTAATAACCGTAGCAAGCTTTCAGAATATGGCTTGCAGTTAGCTGAGAAACAAAAACTTCGTTTTTCATACGGACTTGGTGAAAAACAATTCCGTAACTTGTTCGTACAAGCTACTAAAGCAAAAGAAGGAACTCTTGGTTTTAACTTTATGGTTCTTTTAGAGCGTCGTCTTGATAACGTTGTTTATCGTTTAGGACTTGCAACAACTCGTCGCCAAGCTCGTCAATTTGTTAACCATGGTCATATCCTTGTTGATGGTAAACGTGTTGATATCCCATCATACCGCGTTACTCCAGGACAAGTTATTTCAGTTCGTGAAAAATCAATGAAAGTACCTGCAATCCTTGAAGCTGTTGAAGCTACTTTAGGACGTCCAGCTTTCGTATCATTTGATGCTGAAAAACTTGAAGGTTCATTGACTCGCCTTCCAGAACGCGATGAAATTAACCCAGAAATCAATGAAGCACTTGTCGTTGAATTCTACAACAAAATGCTT

SEQ ID NO: 22304 - protein, 203 aa, Streptococcus agalactiae; identical to SEQ ID NO: 3848

SEQ ID NO: 22305 - protein, 284 aa, Streptococcus agalactiae
ATGAGTGATGCATTTGCAGATGTTGCAAAAATGAAAAAAATAAAAGAAGATATCAAGTCACATGAGGGACAGATGGTCGAACTTACTCTCGAAAATGGTCGTAAGAGGGAAAAAAATAAAATTGGGCGCCTAATTGAAGTTTACCCATCTTTGTTTATCGTAGAGTATAAGGATACTGCAGCTGTACCAGGAGCAATTGATAATACTTATGTAGAGTCTTACACTTATTCAGATATTTTAATGAGAAAACTTTAATTCGTTATTTTGATGACGAGTCAGCAGAA

SEQ ID NO: 22306 - protein, 95 aa, Streptococcus agalactiae
  VARIANT 81: Xaa = Any Amino Acid
MSDAFADVAKMKKIKEDIKSHEGQMVELTLENGRKREKNKIGRLIEVYPSLFIVEYKDTAAVPGAIDNTYVESYTYSDILXEKTLIRYFDDESAE

SEQ ID NO: 22307 - protein, 1353 aa, Streptococcus agalactiae
TTGGCAGAAGTATCTGAGCTAAGAGTACAACCTCAAGACCTGTTGGCAGAACAGGCCGTTTTAGGATCTATCTTTATCTCACCAGAGAAACTGATTATGGTGAGAGAATTTATAAGTCCAGATGATTTTTATAAATATTCACACAAAGTTATCTTCAGAGCGATGATTACCTTAGCTGATAGAAATGATGCAATTGATGCTGCTACTGTTAGAAATATTTTAGATGACCAAGGTGATCTTCAAAACATTGGTGGGTTGGGCTATATTGTTGAATTAGTTAATAGTGTTCCAACAAGTGCTAATGCGGAGTTTTATGCCAAAATAGTTTCTGAGAAAGCCATGTTGCGAGATATCATTTCTAAGTTGACAGATACTGTCAATATGGCCTATGAAGGAAATGATTCTGATGAAATTATTGCTACCGCTGAGAAGGCTTTAGTTGATATTAACGAACACAGTAATCGTAGTGGGTTTAGAAAGATATCTGATGTTTTAAAAGTTAATTACGAAAACTTAGAATTACGTTCACAGCAAACCTCAGATGTCACAGGTTTACCAACTGGATTTAGGGATTTAGACAGGATTACTACAGGTTTACATCCAGATCAATTAATCATCTTAGCGGCTCGTCCTGCAGTAGGTAAAACAGCCTTTGTTTTAAATATTGCTCAAAATGTTGGAACTAAACAAAATAGACCTGTAGCTATTTTTTCACTTGAAATGGGGGCTGAGAGTTTAGTTGACCGTATGTTGGCAGCAGAGGGAATGGTTGATTCCCATAGTTTACGAACTGGTCAGTTGACGGATCAAGATTGGAATAATGTAACGATTGCTCAAGGAGCTTTGGCGGATGCGCCAATTTATATTGATGATACGCCCGGGATTAAAATTACAGAAATTAGAGCACGCTCTAGGAAGTTATCTCAAGAAGTTGATGATGGTTTGGGTTTAATCGTCATTGACTACCTCCAATTAATTTCAGGAACTAGACCAGAAAATCGTCAGCAAGAAGTTTCTGAAATTTCAAGGCAGTTGAAGATTTTAGCTAAAGAATTAAAGGTTCCTGTTATCGCATTAAGCCAGCTCTCTCGTGGGGTTGAGCAAAGGCAGGATAAACGACCGGTCTTATCTGATATTCGTGAATCTGGATCGATTGAACAAGATGCTGACATTGTTGCTTTCTTATATCGAGATGATTATTATCGTAGAGAGGGCGAAGAAGCAGAGGAAATTGTAGAAGATAATACCGTTGAGGTTATTTTAGAAAAGAACCGTGCTGGTGCGCGTGGGACAGTAAAATTAATGTTTCAAAAGGAATATAATAAATTTTCTAGTATAGCTCAATTTGAAGAA

SEQ ID NO: 22308 - protein, 451 aa, Streptococcus agalactiae
MAEVSELRVQPQDLLAEQAVLGSIFISPEKLIMVREFISPDDFYKYSHKVIFRAMITLADRNDAIDAATVRNILDDQGDLQNIGGLGYIVELVNSVPTSANAEFYAKIVSEKAMLRDIISKLTDTVNMAYEGNDSDEIIATAEKALVDINEHSNRSGFRKISDVLKVNYENLELRSQQTSDVTGLPTGFRDLDRITTGLHPDQLIILAARPAVGKTAFVLNIAQNVGTKQNRPVAIFSLEMGAESLVDRMLAAEGMVDSHSLRTGQLTDQDWNNVTIAQGALADAPIYIDDTPGIKITEIRARSRKLSQEVDDGLGLIVIDYLQLISGTRPENRQQEVSEISRQLKILAKELKVPVIALSQLSRGVEQRQDKRPVLSDIRESGSIEQDADIVAFLYRDDYYRREGEEAEEIVEDNTVEVILEKNRAGARGTVKLMFQKEYNKFSSIAQFEE

SEQ ID NO: 22309 - protein, 450 aa, Streptococcus agalactiae
ATGAAAGTTATTTTTTTACAAGATGTTAAGGGGAAAGGAAAAAAAGGTGAGGTTAAGGAAGTACCTACTGGTTATGCTCAAAACTTCTTATTAAAAAAGAATCTAGCTAAAGAAGCAACGACACAAGCTATCGGTGAATTAAAAGGAAAACAAAAGTCCGAAGAAAAAGCGCAAGCAGAAATTTTAGCACAGGCACAGGAGCTGAAAACACAATTAGAATCCGAAACTACACGAGTGCAATTTATTGAAAAGGTAGGTCCAGATGGTCGTACGTTTGGTTCTATCACAGCCAAAAAGATTGCTGAAGAGTTACAAAAACAATACGGCATTAAAATTGACAAACGTCATATTGATTTAGATCATACTATTAGAGCGATTGGTAAGGTTGAAGTACCAGTAAAATTACATAAACAGGTTTCTTCACAGATTAAGCTTGATATCAAAGAAGCG

SEQ ID NO: 22310 - protein, 150 aa, Streptococcus agalactiae
MKVIFLQDVKGKGKKGEVKEVPTGYAQNFLLKKNLAKEATTQAIGELKGKQKSEEKAQAEILAQAQELKTQLESETTRVQFIEKVGPDGRTFGSITAKKIAEELQKQYGIKIDKRHIDLDHTIRAIGKVEVPVKLHKQVSSQIKLDIKEA

SEQ ID NO: 22311 - protein, 357 aa, Streptococcus agalactiae
ATGAATTTGATTTTAAAAGGTGAGCGTATTTATGATAACATCATTGTTGCTACCGGAGAAGAACATAAAGTTTACTCGCATGTTATAGCTAGTAAAGCAGCTGACACCATGTTGACAATGGCAGGTATTGAGGCTACTTTTGTTATTACTAAAAACAGTTCAAATATTGGTATTTCAGCGCGCAGTAGAAATAATATCAATGTCCAGCGCATTATGGAAAAACTTGGTGGTGGCGGACATTTTAGTTTTGCTGCTTGTCAAATACAAGACAAGTCTGTAAAGCAAGTTAGACGCATGTTACTTGAAATAATTGACGAAGATTTAAGAGAAAATAGTACAGTCGAAAATAGAAGGGAT

SEQ ID NO: 22312 - protein, 119 aa, Streptococcus agalactiae
MNLILKGERIYDNIIVATGEEHKVYSHVIASKAADTMLTMAGIEATFVITKNSSNIGISARSRNNINVQRIMEKLGGGGHFSFAACQIQDKSVKQVRRMLLEIIDEDLRENSTVENRRD

SEQ ID NO: 22313 - protein, 415 aa, Streptococcus agalactiae
ATGAAAGTTATTTTTTTACAAGATGTTAAGGGGAAAGGAAAAAAAGGTGAGGTTAAGGAAGTACCTACTGGTTATGCTCAAAACTTCTTATTAAAAAAGAATCTAGCTAAAGAAGCAACGACACAAGCTATCGGTGAATTAAAAGGAAAACAAAAGTCCGAAGAAAAAGCGCAAGCAGAAATTTTAGCACAGGCACAGGAGCTGAAAACACAATTAGAATCCGAAACTACACGAGTGCAATTTATTGAAAAGGTAGGTCCAGATGGTCGTACGTTTGGTTCTATCACAGCCAAAAAGATTGCTGAAGAGTTACAAAAAATACGGCATTAAAATTGACAAACGTCATATTGATTTAGATCATACTATTAGAGCGATTGGTAAGGTTGAAGTACCAGTAAAATTACATAAANNNNNT

SEQ ID NO: 22314 - protein, 139 aa, Streptococcus agalactiae
  VARIANT 107, 138, 139: Xaa = Any Amino Acid
MKVIFLQDVKGKGKKGEVKEVPTGYAQNFLLKKNLAKEATTQAIGELKGKQKSEEKAQAEILAQAQELKTQLESETTRVQFIEKVGPDGRTFGSITAKKIAEELQKXYGIKIDKRHIDLDHTIRAIGKVEVPVKLHKXX

SEQ ID NO: 22315 - protein, 1980 aa, Streptococcus agalactiae
ATGAAAAGATTTCGTTTTGCAACCGTCCATTTAGTTTTAATAGGCCTGATTTTATTTGGACTATTAGCTATTTGTGTTAGGTTATTTCAATCCTATACGGCTCTATTATTGGCTATTTTTGTTGCTTTATCTTTTGTTGTTGCCTTATTATATTACCAAAAGATAACTTATGAACTATCTGAAGTTGAACAAATTGAATTACTTAATGATCAAACAGAAGTTTCTCTTAAGAGTCTTCTTGAACAAATGCCAGTTGGTGTTATACAATTTGATCTTGAAACAAATGATATTGAGTGGTTTAATCCTTATGCAGAATTGATTTTTACTGGGGATAATGGCCATTTTCAGTCTACTACTGTTAAAGATATCATTACTAGTAGACGTAATGGAACGGCTGGGCAATCATTTGAATACGGTGATAACAAATATTCAGCTTATTTGGATACAGAGACGGGTGTTTTCTATTTCTTTGATAATTTCATGGGGAATAGAAGAAACTATGATAGTTCAATGCTACGTCCAGTTATTGGTATTATTTCCATTGATAACTACGATGATATTATGGATACTATGTTAGAGGCTGATATGTCAAAGATTAACGCCTTCGTGACTAGTTTTATTTCTGATTTTACACAGTCTAAAAATATTTTTTATCGTCGTGTCAATATGGATCGATACTATATTTTTACCGACTATAGCGTTTTAAATACATTGATAAAAGATAAATTTGATATTTTAAATGAGTTTCGAAAACGCGCTCAGGAAAACCATTTATCATTAACATTAAGTATGGGAATTTCTTATGGTGATGGTAACCATAATCAAATTGGGCAAATTGCTTTAGAAAATCTTAATACAGCACTCGTTCGCGGAGGAGATCAAATAGTAGTACGTGAAAATGATAGTAGTAAAAAAGCACTTTACTTTGGTGGTGGTGCTGTTTCAACTATTAAACGTTCACGAACACGTACCAGAGCTATGATGACTGCTATTTCTGACCGTTTGAAAGTAGTTGATAGTGTCTTTATTGTGGGACACAGGAAATTGGACATGGATGCACTAGGTGCATCTGTAGGGATGCAATTTTTTGCTAGTAATATTGTTAATGCCAGTTATGTAGTTTATGACCCAAATGACATGAATTCTGATATTGAAAGAGCAATTGATTACTTGCAAGAAGACGGCGAAACACGTCTCGTAAGTGTTGAGAGAGCTTTTGAACTAATTACTCAAAATTCTTTATTAGTCATGGTAGACCATTCTAAAACAGCTTTAACCTTATCTAAGGAATTCTTTAACAAGTTTGCAGATGTTATTGTGGTAGATCATCATAGAAGAGATGAAGATTTTCCCAAAAATGCTGTCCTTTCATTTATAGAAAGTGGCGCAAGTAGTGCCAGCGAATTAGTTACAGAATTGATTCAATTTCAACAAGCTAAAGATAAATTAAGCCGCAGTCAAGCAAGTATTTTAATGGCTGGTATCATGCTTGATACAAGAAATTTTGCATCTAATGTAACGAGTAGAACTTTTGATGTGGCAAGCTATTTACGCGGTTTAGGTAGTAATAGTATGGCTATTCAAAAAATATCAGCTACAGATTTTGATGAATATCGTTTAATTAATGAATTGATTTTAAAAGGTGAGCGTATTTATGATAACATCATTGTTGCTACCGGAGAAGAACATAAAGTTTACTCGCATGTTATAGCTAGTAAAGCAGCTGACACCATGTTGACAATGGCAGGTATTGAGGCTACTTTTGTTATTACTAAAAACAGTTCAAATATTGGTATTTCAGCGCGCAGTAGAAATAATATCAATGTCCAGCGCATTATGGAAAAACTTGGTGGTGGCGGACATTTTAGTTTTGCTGCTTGTCAAATACAAGACAAGTCTGTAAAGCAAGTTAGACGCATGTTACTTGAAATAATTGACGAAGATTTAAGAGAAAATAGTACAGTCGAAAATAGAAGGGAT

SEQ ID NO: 22316 - protein, 660 aa, Streptococcus agalactiae
MKRFRFATVHLVLIGLILFGLLAICVRLFQSYTALLLAIFVALSFVVALLYYQKITYELSEVEQIELLNDQTEVSLKSLLEQMPVGVIQFDLETNDIEWFNPYAELIFTGDNGHFQSTTVKDIITSRRNGTAGQSFEYGDNKYSAYLDTETGVFYFFDNFMGNRRNYDSSMLRPVIGIISIDNYDDIMDTMLEADMSKINAFVTSFISDFTQSKNIFYRRVNMDRYYIFTDYSVLNTLIKDKFDILNEFRKRAQENHLSLTLSMGISYGDGNHNQIGQIALENLNTALVRGGDQIVVRENDSSKKALYFGGGAVSTIKRSRTRTRAMMTAISDRLKVVDSVFIVGHRKLDMDALGASVGMQFFASNIVNASYVVYDPNDMNSDIERAIDYLQEDGETRLVSVERAFELITQNSLLVMVDHSKTALTLSKEFFNKFADVIVVDHHRRDEDFPKNAVLSFIESGASSASELVTELIQFQQAKDKLSRSQASILMAGIMLDTRNFASNVTSRTFDVASYLRGLGSNSMAIQKISATDFDEYRLINELILKGERIYDNIIVATGEEHKVYSHVIASKAADTMLTMAGIEATFVITKNSSNIGISARSRNNINVQRIMEKLGGGGHFSFAACQIQDKSVKQVRRMLLEIIDEDLRENSTVENRRD

SEQ ID NO: 22317 - protein, 1899 aa, Streptococcus agalactiae
ATGACACATAATTTTGCAGAAAACTATGATATTATTGTTGTTGGAGCGGGTCATGCAGGTGTGGAAGCTAGTCTAGCTGCTAGTCGTATGGGATGTAAGACACTTCTAGCTACTATCAACTTAGAAATGTTGGCATTTATGCCTTGTAATCCTTCTATAGGTGGCTCTGCTAAAGGTATCGTTGTCAGAGAGATTGACGCTTTAGGTGGTGAAATGGGTAAAAACATTGATAAAACCTATATCCAAATGAAAATGCTTAATACAGGTAAGGGGCCTGCTGTCCGTGCCTTAAGAGCACAAGCTGATAAAGCCCTCTATGCACAAACAATGAAGCAAACTGTAGAAAAGCAAGAAAACCTTACCTTAAGACAAGCTATGATTGACGAAATACTTGTTGAGGATGGAAAGGTTGTGGGGGTTCGTACAGCAACTAATCAGAAATTTTCAGCAAAATCTGTTGTTATAACAACAGGTACTGCTCTTCGAGGAGAGATTATATTAGGTGAGCTTAAGTACTCTTCGGGCCCTAATAATAGTTTAGCTTCTGTGACATTGGCAGATAATTTAAGAGACCTAGGATTAGAAATTGGTCGTTTCAAAACTGGAACACCTCCTCGTGTAAAAGCCTCCTCTATTAATTATGAAAAGACAGAGATACAACCTGGGGATGAGCAACCAAATCATTTTTCATTTATGTCTAGAGATGAAGATTATATTACTGACCAGGTACCGTGCTGGTTGACCTATACGAATACTTTGAGTCATGACATCATCAATCAAAATCTACACCGTGCTCCTATGTTTTCTGGAATCGTTAAGGGAGTTGGTCCTCGATATTGTCCGTCAATTGAAGATAAAATTGTGCGTTTTGCTGATAAAGAGCGCCACCAACTCTTCTTAGAACCAGAAGGTAGACACACTGAAGAAGTTTATGTTCAAGGGCTATCAACGAGTCTTCCTGAGGATGTTCAAGTTGATTTATTACGTTCTATAAAAGGGCTTGAAAATGCTGAAATGATGCGTACAGGCTATGCTATTGAGTATGATATTGTATTGCCTCATCAATTAAGAGCAACACTCGAAACAAAAGTAATTGCTGGTTTGTTTACTGCAGGACAGACTAATGGTACTTCAGGTTATGAAGAAGCTGCTGGTCAAGGGTTGGTTGCTGGGATCAACGCTGCTCTTAAAGTTCAAGGGAAGCCAGAACTTATTTTAAAACGAAGTGATGCTTACATTGGTGTCATGATTGATGATTTAGTTACCAAAGGGACTCTAGAACCATATCGTCTGTTGACAAGTCGCGCAGAATATCGTCTGATTCTTCGTCATGATAATGCAGATATGCGTTTAACAGAAATCGGTTATGAGATTGGCCTAGTAGATGAAGAGCGTTATGCGATATTTAAAAAGCGTCAAATGCAATTTGAAAATGAATTAGAACGTTTAGACTCTATAAAGTTAAAGCCAGTTTCTGAGACAAATAAACGGATTCAAGAATTGGGCTTTAAACCTTTGACAGATGCTTTAACTGCCAAAGAATTTATGCGCCGCCCACAAATCACATATGCAGTAGCAACGGATTTTGTTGGTTGTGCTGATGAGCCATTAGACAGTAAGGTTATTGAACTTTTGGAAACTGAAATTAAATACGAAGGCTATATTAAAAAGGCTTTAGATCAAGTTGCAAAAATGAAACGAATGGAAGAAAAACGTATTCCCCCTCATATTGACTGGGACGACATTGATTCTATCGCAACAGAAGCTAGACAAAAATTCAAAAAAATTAACCCAGAAACGCTAGGTCAGGCTAGTCGTATTTCAGGAGTTAATCCAGCCGATATTAGTATTTTAATGGTTTACCTTGAAGGAAGACAAAAAGGTCGTAAAAATATCAAT

SEQ ID NO: 22318 - protein, 633 aa, Streptococcus agalactiae
MTHNFAENYDIIVVGAGHAGVEASLAASRMGCKTLLATINLEMLAFMPCNPSIGGSAKGIVVREIDALGGEMGKNIDKTYIQMKMLNTGKGPAVRALRAQADKALYAQTMKQTVEKQENLTLRQAMIDEILVEDGKVVGVRTATNQKFSAKSVVITTGTALRGEIILGELKYSSGPNNSLASVTLADNLRDLGLEIGRFKTGTPPRVKASSINYEKTEIQPGDEQPNHFSFMSRDEDYITDQVPCWLTYTNTLSHDIINQNLHRAPMFSGIVKGVGPRYCPSIEDKIVRFADKERHQLFLEPEGRHTEEVYVQGLSTSLPEDVQVDLLRSIKGLENAEMMRTGYAIEYDIVLPHQLRATLETKVIAGLFTAGQTNGTSGYEEAAGQGLVAGINAALKVQGKPELILKRSDAYIGVMIDDLVTKGTLEPYRLLTSRAEYRLILRHDNADMRLTEIGYEIGLVDEERYAIFKKRQMQFENELERLDSIKLKPVSETNKRIQELGFKPLTDALTAKEFMRRPQITYAVATDFVGCADEPLDSKVIELLETEIKYEGYIKKALDQVAKMKRMEEKRIPPHIDWDDIDSIATEARQKFKKINPETLGQASRISGVNPADISILMVYLEGRQKGRKNIN

SEQ ID NO: 22319 - protein, 609 aa, Streptococcus agalactiae
ATGATTTCAAAATTTATTTTAGCTTTCATGGCTTTTTTCGCCATTATGAATCCCATTTCTAATTTGCCAGCTTTTATGGCTTTAGTAGCTGATGATGATCAGAAGATTTCACGTCGGATTGCAGCAAAAGGAGTATTACTTGCTTTTGTCATTATTGTAATATTTGTATTAAGTGGCCACTTACTTTTTAACTTATTTGGGATTACCCTAGCCGCCCTAAAAATATCTGGTGGAATATTGGTAGGCATTATAGGTTATAAAATGATTAATGGTATACATTCACCAACCAATAAAAACCTAGAGGAGCATAAGGATGATCCAATGAATGTGGCAGTTTCACCATTAGCAATGCCCCTTTTGGCAGGTCCGGGTACTATTGCAACTGCTATGGGGTTATCAAGTGGTGGTTTATCTGGCAAACTCATTACTATACTTGCTTTTGCCATACTATGTGTGATAATGTATGTTATTTTAATAAGTGCAAACGAAATTACTAAATTTCTTGGAAAAAATGCAATGACTATAATCACCAAAATGATGGGACTTATTTTGATGACTATCGGGATAGAGATGCTAATAACAGGCATAAAAATTGGTTTTCATTTAACA

SEQ ID NO: 22320 - protein, 203 aa, Streptococcus agalactiae; identical to SEQ ID NO: 8560

SEQ ID NO: 22321 - protein, 1119 aa, Streptococcus agalactiae
ATGACTGATAATTCAAACATTCGTGTCGTTGTAGGCATGAGTGGAGGTGTTGATTCATCAGTAACTGCCCTGCTTTTAAAAGAGCAAGGTTATGATGTTATTGGTGTTTTTATGAAAAATTGGGATGACACAGATGAATTTGGTGTTTGTACGGCTACTGAAGATTATAAAGATGTTGCTGCTGTTGCTGATCAGATCGGCATACCATACTACTCTGTCAACTTTGAAAAAGAGTATTGGGACAGGGTTTTCGAATATTTTTTAGCAGAATATCGAGCAGGTCGTACGCCAAATCCAGATGTTATGTGTAATAAGGAAATTAAATTTAAAGCATTTCTAGATTATGCGATGACATTAGGTGCTGACTATGTAGCAACAGGTCATTATGCACAAGTAACACGTGATGAGAACGGAATAGTTCATATGCTTAGAGGAGCAGATAATAATAAGGATCAAACTTATTTTCTAAGTCAATTATCTCAGGAGCAATTGCAAAAAACGTTATTTCCACTTGGTCATTTACAAAAACCAGAAGTTCGCCGTATAGCTGAAGAAGCAGGACTTGCGACCGCTAAGAAAAAAGACTCTACTGGTATTTGTTTTATTGGAGAAAAAAATTTCAAGGATTTCCTGGGTCAATATTTACCGGCTCAACCAGGTCGTATGATGACTGTTGATGGTCGTGACATGGGTGAACATGCTGGTTTAATGTATTATACAATTGGTCAAAGAGGGGGCCTTGGTATTGGTGGGCAACATGGTGGAGATAATAAACCTTGGTTTGTAGTTGGAAAGGATTTAAGTAAAAACATTCTTTATGTAGGTCAAGGTTTCTATCATGACTCATTGATGTCAACTAGCTTGACAGCTTCTGAAATCCACTTTACACGTGATATGCCTAATGAATTTAAGCTAGAATGTACAGCTAAGTTCAGATATCGTCAACCTGACAGTAAAGTTACAGTTTACGTAAAAGGTAATCAAGCAAGGGTTGTGTTTGATGATTTACAACGAGCAATCACACCAGGTCAAGCTGTTGTTTTTTATAATGAACAAGAATGTTTAGGCGGTGGGATGATTGATCAGGCTTATCGTGATGATAAAATCTGTCAATACATT

SEQ ID NO: 22322 - protein, 373 aa, Streptococcus agalactiae; identical to SEQ ID NO: 3870

SEQ ID NO: 22323 - protein, 666 aa, Streptococcus agalactiae; identical to SEQ ID NO: 8563

SEQ ID NO: 22324 - protein, 222 aa, Streptococcus agalactiae; identical to SEQ ID NO: 3872

SEQ ID NO: 22325 - protein, 868 aa, Streptococcus agalactiae
ATGTTTTATACAATTGAAGAGCTGGTAGAGCAAGCTAATAGCCAACATAAGGGTAACATAGCAGAGCTCATGATCCAAACGGAAATTGAAATGACTGGTAGAAGTCGTGAAGAAATTCGTTATATTATGTCCCGAAACCTTGAAGTTATGAAAGCTTCTGTTATTGATGGATTAACCTCTAGTAAATCAATCAGTGGCTTAACAGGCGGTGATGCTGTCAAGATGGATCAATATTTACAATCAGGAAAAACTATTTCAGATACCACAATCCTAGCTGCCGTTAGGAATGCTATGGCTGTTAATGAGTTGAATGCTAAGATGGGACTGGTCTGTGCAACACCAACTGCAGGTAGTGCAGGATGTTTACCAGCCGTGATTTCTACAGCCATGAAAAGCTTAATTTAACAGAAGAAGAGCACTTGATTTTCTATTTACAGCCGGCGCATTTGGTCTCGTCATTGGTAATAATGCCTCTATCTCAGGTGCAGAAGGAGGTTGCCAAGCTGAAGTTGGGTCAGCTAGTGCTATGGCTGCGGCTGCTTTAGTTATGGCTGCTGGAGGTACTCCTTTCCAAGCTAGCCAAGCTATAGCATTTGTTATTAAAAATATGCTTGGACTTATCTGTGATCCTGTTGCAGGTTTAGTTGAAGTCCCTTGTGTGAAGCGGAATGCTCTTGGATCAAGTTTTGCACTTGTTGCTGCTGATATGGCCTTGGCTGGTATTGAATCGCAAATTCCAGTAGATGAAGTTATTGATGCAATGTATCAAGTTGGATCAAGTTTACCGACTGCTTTTCGTGAAACTGCAGAAGGAGGACTTGCTGCCACGCCGACAGGAAGACGTTATAGCAAAGAAATTTTTGGGGAA

SEQ ID NO: 22326 - protein, 290 aa, Streptococcus agalactiae
MFYTIEELVEQANSQHKGNIAELMIQTEIEMTGRSREEIRYIMSRNLEVMKASVIDGLTSSKSISGLTGGDAVKMDQYLQSGKTISDTTILAAVRNAMAVNELNAKMGLVCATPTAGSAGCLPAVISTAIEKLNLTEEEQLDFLFTAGAFGLVIGNNASISGAEGGCQAEVGSASAMAAAALVMAAGGTPFQASQAIAFVIKNMLGLICDPVAGLVEVPCVKRNALGSSFALVAADMALAGIESQIPVDEVIDAMYQVGSSLPTAFRETAEGGLAATPTGRRYSKEIFGE

SEQ ID NO: 22327 - protein, 675 aa, Streptococcus agalactiae
TTGAATGTAAAAAAACAACATTTAGCTTATGGAGCTATCACTTTAGTAGCCCTTTTTTCATGTATTTTGGCTGTAACGGTCATTTTTAAAAGTTCACAAGTTACCACTGAATCTTTGTCAAAAGCAGATAAAGTTCGCGTAGCCAAAAAATCAAAAATGACTAAGGCGACATCTAAATCAAAAGTAGAAGATGTAAAACAGGCTCCAAAACCTTCTCAGGCATCTAATGAAGCCCCAAAATCAAGTTCTCAATCTACAGAAGCTAATTCTCAGCAACAAGTTACTGCGAGTGAAGAGGCAGCTGTAGAACAAGCAGTTGTAACAGAAAACACCCCTGCTACCAGTCAGGCACAACAAGCTTATGCTGTTACTGAGACAACTTATAGACCTGCTCAACACCAGACAAGTGGCCAAGTATTGAGTAATGGAAATACTGCAGGGGCTATTGGCTCAGCAGCTGCAGCACAAATGGCTGCTGCAACAGGAGTCCCTCAGTCTACTTGGGAACATATTATTGCCCGTGAATCAAATGGTAATCCTAATGTTGCTAATGCCTCAGGAGCTTCAGGACTTTTCCAAACGATGCCAGGTTGGGGTTCAACAGCTACAGTTCAGGATCAAGTTAATTCAGCTATTAAAGCTTATCGTGCTCAAGGTTTATCAGCTTGGGGTTAC

SEQ ID NO: 22328 - protein, 225 aa, Streptococcus agalactiae
MNVKKQHLAYGAITLVALFSCILAVTVIFKSSQVTTESLSKADKVRVAKKSKMTKATSKSKVEDVKQAPKPSQASNEAPKSSSQSTEANSQQQVTASEEAAVEQAVVTENTPATSQAQQAYAVTETTYRPAQHQTSGQVLSNGNTAGAIGSAAAAQMAAATGVPQSTWEHIIARESNGNPNVANASGASGLFQTMPGWGSTATVQDQVNSAIKAYRAQGLSAWGY

SEQ ID NO: 22329 - protein, 537 aa, Streptococcus agalactiae
ATGTCAATAACCTCGGTTAAAAAATCAAAACCATTTAAATTAGGAGTGGCAGGTCTTTTAGTGGGTGCTTCATTAGCTTTACCACTTTCAGTAAGCGCAGCATCTTATACCGTGAAATCAGGTGATACCTTATCAGCTATTGCTAAAAATCATAAAACTACGGTACAAGAGTTAGTGTCTCTCAATAGTATCAGTAACGCTGATGTCATCAGTATAGGTGATGTTTTAAAATTGGATAATTCTACAGCTAGTCAAGCAGAAGCAAAATCTCAACCAACAATTGAAAATTCAATGAATTCTTCATCAAATTTGAGTTCAAGTGATTCAGCCGCAAAAGAAGAAATAGCTCGTCGTGAATCAAATGGTAGTTATACTGCACAGAATGGACAATATTATGGAAGATATCAACTGTCTCAATCTTACCTAAATGGCGACTTATCTCCTGAAAATCAAGAAAAAGTAGCGGACAATTATGTGGCTTCTCGTTACGGATCTTGGTCGGCAGCGCTATCATTTTGGAATAGTAACGGTTGGTAT

SEQ ID NO: 22330 - protein, 179 aa, Streptococcus agalactiae
MSITSVKKSKPFKLGVAGLLVGASLALPLSVSAASYTVKSGDTLSAIAKNHKTTVQELVSLNSISNADVISIGDVLKLDNSTASQAEAKSQPTIENSMNSSSNLSSSDSAAKEEIARRESNGSYTAQNGQYYGRYQLSQSYLNGDLSPENQEKVADNYVASRYGSWSAALSFWNSNGWY

SEQ ID NO: 22331 - protein, 791 aa, Streptococcus agalactiae
ATGGATAAATTGATTTTGGGACGTTACATACCAGGTAATTCTCTCATTCATAAATTAGATCCTCGAAGTAAGTTACTAGCCATGTTGCTTTTTATCATTATTGTTTTTTGGGCAAATAATGTAGTGACAAATGTGATCGTATTCATTTTTACGTTGGTTATTGTGGGTTTATCTCAGATAAAATTTTCCTATTTTTTCAATGGTATTAAACCGATGGTTGGTATTATTTTATTTACAACCCTGTTCCAGATGCTGTTTGCACAAGGCGGGCAGGTTATCTTCTCGTTTTGGATTTTTAGCATCACTAGCCTTGGGTTACAACAAGCAGCACTTATTTTTATGAGATTTGTTTTAATTATCTTCTTTTCGACATTACTTACCTTAACTACTACTCCGTTAAGTTTAGCAGATGCTGTTGAATCTTTGTTAAAACCATTGGAAGTACTGAGAGTACCAGCACACGAGATTGGTTTGATGTTATCCCTTAGCTTACGTTTCGTTCCTACTTTAATGGATGATACAACACGTATCATGAATGCTCAAAGAGCTCGTGGAGTTGATTTTGGAGAGGGAAACCTAATTCATAAGGTTAAGTCCATTATCCCTATTTTGATTCCATTATTTGCTTCTAGTTTAAAAGAGCAGATGCGTTGGCAATTGCTATGGAAGCAAGAGGTTATCAAGGCGGAGCCAATCGTAGTAAGTACCGTTTATTGAAGTGGACTGTTCGGGATACTTTTAGTATATTACTGATGTTATTATTGGGTTTGAGTTTGTTTCTATTAAAAAAT

SEQ ID NO: 22332 - protein, 264 aa, Streptococcus agalactiae; identical to SEQ ID NO: 3880

SEQ ID NO: 22333 - protein, 840 aa, Streptococcus agalactiae
ATGGGAATTGAATTTAAAAATGTAAGTTATACCTATCAAGCCGGCACTCCTTTTGAAGGGCGTGCCCTTTTTGACGTCAATCTGAAAATTGAAGATGCTTCCTATACCGCGTTCATTGGGCACACAGGTTCTGGAAAATCAACTATTATGCAACTTTTGAATGGTTTACATATTCCTACAAAAGGTGAGGTAATTGTCGATGATTTTTCTATTAAAGCAGGGGACAAGAACAAAGAAATCAAATTTATAAGGCAAAAAGTTGGTTTAGTTTTTCAATTTCCAGAAAGTCAGCTTTTTGAAGAGACAGTTTTAAAAGATGTTGCTTTTGGACCACAAAATTTTGGTATTTCTCAGATTGAAGCTGAAAGGCTGGCTGAAGAAAAATTAAGGTTAGTTGGTATCAGTGAGGATTTATTCGATAAAAATCCATTTGAACTTTCTGGAGGGCAGATGAGGCGGGTTGCTATAGCTGGTATTTTAGCGATGGAACCCAAAGTACTAGTACTAGATGAGCCAACAGCTGGACTTGATCCTAAGGGAAGAAAAGAATTAATGACTCTTTTTAAAAATCTTCATAAAAAAGGAATGACTATCGTCTTAGTGACTCACTTAATGGACGATGTAGCGGATTATGCTGACTATGTGTATGTTTTAGAAGCAGGGAAAGTAACCTTATCAGGACAACCAAAGCAGATTTTTCAAGAAGTAGAACTTTTAGAAAGTAAACAATTAGGAGTTCCCAAAATCACCAAGTTTGCTCAAAGGCTATCTCATAAGGGATTAAATTTACCTAGTTTACCAATTACTATTAACGAATTTGTGGAGGCTATTAAGCATGGA

SEQ ID NO: 22334 - protein, 280 aa, Streptococcus agalactiae; identical to SEQ ID NO: 3882

SEQ ID NO: 22335 - protein, 837 aa, Streptococcus agalactiae
ATGACAAATATTATTACCGTTAATAATCTCTTTTTTAAATATGATAGTAATCAAACACATTATCAATTGGAGAATGTATCGTTTCATGTGAAACAAGGAGAATGGCTATCTATTATTGGTCATAATGGTTCTGGGAAATCCACTACTGTTCGTTTAATAGATGGGCTTTTAGAGGCGGAGTCAGGCCAGATTATCATTGATGGACAAGAGTTAACCGAAGATAATGTCTGGGAGTTACGTCACAAGATTGGCATGGTATTTCAAAATCCTGATAACCAATTTGTAGGGGCAACTGTTGAAGATGACGTCGCCTTTGGTTTGGAAAATAAAGGTATTCCTTTGAAAGACATGAAAGAAAGAGTGGACCAAGCACTTGATTTGGTAGGCATGTCTGAATTTAAAATGAGGGAGCCTGCACGTTTATCTGGGGGACAAAAGCAGCGTGTAGCCATTGCAGGAGCTGTAGCTATGCGTCCACAAGTTATCATCTTGGATGAGGCGACTAGTATGCTTGATCCTGAGGGACGATTGGAACTGATAAGAACGATACGAGCTATTCGTCAAAAATATAATCTTACTGTTATTTCAATTACACACGACTTAGATGAAGTTGCATTGAGTGATCGTGTCATCGTTATGAAAAATGGTAAAGTTGAGTCGACATCCACTCCAAAAGCGTTATTTGGTCGTGGAAATCGTTTGATTAGTTTAGGTTTAGATGTTCCCTTTACAAGTAGGTTAATGGCAGAACTGGCTGCTAATGGTCTTGATATAGGGACAGAGTATCTTACAGAGAAGGAATTAGAAGAACAATTATGGGAATTGAATTTAAAAATG

SEQ ID NO: 22336 - protein, 279 aa, Streptococcus agalactiae; identical to SEQ ID NO: 3884

SEQ ID NO: 22337 - protein, 539 aa, Streptococcus agalactiae
ATGGTGAAGAAAGAAAATATTCCGAATCTATTAACTGTAGTCAGAATTTTAATGATTCCGTTATTTATAGTATTAACTTCAGTAACAACAAGTACAACTTGGCATATTGTTGCAGCTATTGTATTTGCTATTGCAAGCTTGACCGATTACCTAGACGGTTATCTAGCACGTAAATGGCAAGTAGTAACAAATTTTGGGAAATTTGCAGATCCATTAGCTGATAAAATGCTAGTTATGAGTGCTTTTATCATGTTAGTTGGACTAGACTTAGCACCGGCTTGGGTTTCAGCTATTATCATTTGTAGAGAGCTAGCAGTTACAGGTTTGCGTTTACTTTTAGTTGAAACAGGTGGAACAGTACTTGCTGCAGCTATGCCAGGGAAAATAAAGACGGCTACTCAAATGTTTGCAGTTATTTTTTTGTTAGTACATTGGATGACACTGGTAACATCATGTTATACATTGCTTTATTCTTTACCTTGTATTCAGGCTACGACTATTTTAAAGGTGCAGGCTTCTTATTTAAGGATACTTTTAAA

SEQ ID NO: 22338 - protein, 180 aa, Streptococcus agalactiae; identical to SEQ ID NO: 17682

SEQ ID NO: 22339 - protein, 1278 aa, Streptococcus agalactiae
ATGACAGTTAATAAAATAACTTATCAGAACCTTCAGGAGGAAGTATATAAGTTAACATTAGAGAGCGGGCTAAATGTATACCTTATTCCAAAACCATCATTTAAGGAAACTGTTGGAGTATTGACAGCAAATTTTGGATCACTCCATACAAGATATACGAGGAATGGTTGTGTAGAACATTATCCGGCAGGAATTGCTCACTTCTTAGAACATAAATTATTTGAACTGGATAAAGGACAAGACGCTGCAACTCAATTTACTAAATATGGCGCCGAGAGTAATGCCTTTACAACTTTTGATAAAACTAGTTTTTATTTTTCAACTATAAGTCACATTACAAACTGCTTAGATATACTACTTGACTTTGTATTGACAACAAACTTTACAGAAGAGTCAATTACTAAGAAAAAGCATTATCAAACAGAAATTGAAATGTATCAAGATGACCCTGAATATAGGCTTTATCAAGGAGTGTTATCGAACCTTTATCCCAACTCTCCATTAGCATTTGATATCGCTGGAGATTACCAATCAATCTCTCAAATAACCTTAACCGATTTACAAGAAAATCACAAAGACTTTTATCAGTTGTCTAATATGAATTTAGTTCTTGTTGGACAATTTAGTCCACAAGAAATTATAACTTACCTTCAAAAAAATTCTCATTTAACAAGTTACTCACAGAATATTGACCGAGATTCTATTAGTCTTGAACCTGTTATAAAAAACAACTCTTGCCATATGACAGTGACAAAACCTAAATTAGCTATTGGTTATCGAAAATCAAGTCATATGAGACATGGTTCTTACCTAAAAGAGAAAATCGGATTACAGCTATTTTTTGCAATGCTTTTAGGATGGACTTCTACAATTAATCAAGACTGGTACGAATCTGGTCAAATTGATGACTCTTTTGATATAGAAATTGAAGTTCATCCAGATTTTGAGTGCGTTATTATTTCTTTAGATACGACAGAGCCAATTGCTTTTTCAACTCAGTTGAGGTTATTGCTAAAAAATGCTTTGCAATCATCTGATCTTACCGAAAGCCACTTACAAAACGTTAAGAGAGAGCTCTATGGCGATTTTTTAAGGAGCTTAGATTCTATTGAAAATCTCGCAATGCAATTCGTCACCTATTTATATGATGGAAAAACGATGTATTTAGATTTGCCATCTATCGTTGAAGAATTAGACTTGGAAGATGTCATTACGATTGGTAAGGATTTCTTAGATAATGCTGACACATCTGACTTCGTTATTTTTCCAAAATCTTCG

SEQ ID NO: 22340 - protein, 427 aa, Streptococcus agalactiae
  VARIANT 138, 142: Xaa = Any Amino Acid
MTVNKITYQNLQEEVYKLTLESGLNVYLIPKPSFKETVGVLTANFGSLHTRYTRNGCVEHYPAGIAHFLEHKLFELDKGQDAATQFTKYGAESNAFTTFDKTSFYFSTISHITNCLDILLDFVLTTNFTEESITKEKXIIKXEIEMYQDDPEYRLYQGVLSNLYPNSPLAFDIAGDYQSISQITLTDLQENHKDFYQLSNMNLVLVGQFSPQEIITYLQKNSHLTSYSQNIDRDSISLEPVIKNNSCHMTVTKPKLAIGYRKSSHMRHGSYLKEKIGLQLFFAMLLGWTSTINQDWYESGQIDDSFDIEIEVHPDFECVIISLDTTEPIAFSTQLRLLLKNALQSSDLTESHLQNVKRELYGDFLRSLDSIENLAMQFVTYLYDGKTMYLDLPSIVEELDLEDVITIGKDFLDNADTSDFVIFPKSS

SEQ ID NO: 22341 - protein, 1242 aa, Streptococcus agalactiae
ATGAAAATAGTTGAAGGCGTTTCTCTACATTTAATTAAAAACCAACAATTTAAGACTAATCATCTTACTTTTCGATTTTCAGGTGATTTTAATAATAAAACAGTAGCACGTAGATCGCTCGTTGCTCAAATGTTAGTTACTGCAAATGCTAAGTACCCTAAGGTACAAGAATTTCGAGAAAAGTTAGCTTCCTTATATGGTGCTAGTTTATCAACTAAGATTTCTACTAAGGGTCTTGTTCACATTGTTGATATTGATATTGTATTTGTTAAAAATACCTTTACTTTAGAACAAGAAAATATCGTTGAACAAATTATTACATTCTTGGAGGATATGCTGTTTTCTCCTTTAATTTCTTTAGAACAGTATCAAACATCTATTTTTGATACTGAGAAGAAAAACCTTATTCAATATTTAGAGGCCGATATTGAAGATAATTTTTATAGCAGTGACTTAGCACTAAAATCTTTATTCTACAATAATAAGACACTTCGTTTACCTAAGTATGGTACAGCATCTTTAGTGGAATCAGAAAATTCATTTACAGCTTATCAAGAATTTCAGAAGATGCTTAAGGAAGATCAATTAGATATTTTTGTCGTAGGAGATTTTGATGACTATCGAATGATTCAGGCATTTAATCGTATGGCATTTGAGCCACGTCACAAAGTATTAGCTTTTGATTATACGCAGACTTATGAAAATATAACGAGAAGTCAAGTAGAAGATAAGGACGTTAATCAATCTATTATGCAATTGGCTTATCATCTTCCAATAACTTATAAAGATGAAGATTATTTTGCTTTAATAGTATTTAACGGTTTATTTGGTGCTTTTGCCCATTCCTTGTTGTTTACAGAAATTCGAGAAAAGCAAGGTTTAGCCTATACTATAGGTAGTCAATTTGACAGCTTTACAGGTCTCTTTACGATATATGCAGGTATTGATAGAGAGAATCGTGAGCGTTTTTTGAAGCTTATTAATAAGCAATTCAATAATATTAAGATGGGCAGGTTCTCTTCTACATTATTGAAACAAACAAAAGATATATTGAAAATGAACTATGTTTTAGCTTCTGATAATCCTAAGGTCATAGTTGACCACATTTATCATGAACATTATTTAGATCAGTTTCATACTTCAGCACTATTCATTGACAAAGTGGACGATGTAACAAAATCAGATATTGTCAGCGTAGCAACAAAATTAAAATTACAAGCTTTTTATTTTTTGGAAGGAAAC

SEQ ID NO: 22342 - protein, 414 aa, Streptococcus agalactiae
MKIVEGVSLHLIKNQQFKTNHLTFRFSGDFNNKTVARRSLVAQMLVTANAKYPKVQEFREKLASLYGASLSTKISTKGLVHIVDIDIVFVKNTFTLEQENIVEQIITFLEDMLFSPLISLEQYQTSIFDTEKKNLIQYLEADIEDNFYSSDLALKSLFYNNKTLRLPKYGTASLVESENSFTAYQEFQKMLKEDQLDIFVVGDFDDYRMIQAFNRMAFEPRHKVLAFDYTQTYENITRSQVEDKDVNQSIMQLAYHLPITYKDEDYFALIVFNGLFGAFAHSLLFTEIREKQGLAYTIGSQFDSFTGLFTIYAGIDRENRERFLKLINKQFNNIKMGRFSSTLLKQTKDILKMNYVLASDNPKVIVDHIYHEHYLDQFHTSALFIDKVDDVTKSDIVSVATKLKLQAFYFLEGN

SEQ ID NO: 22343 - protein, 351 aa, Streptococcus agalactiae; identical to SEQ ID NO: 14029

SEQ ID NO: 22344 - protein, 117 aa, Streptococcus agalactiae; identical to SEQ ID NO: 14030

SEQ ID NO: 22345 - protein, 1107 aa, Streptococcus agalactiae
ATGTGGATAAAAAATATTTCTTTAAAACATTATCGTAATTATGAAGAAGCACAAGTAGATTTTTCACCCAACCTCAATATTTTCATTGGCCGCAATGCTCAAGGAAAGACAAATTTTTTAGAAGCAATCTACTTCTTGGCTTTGACTCGAAGTCATCGTACCCGTTCTGATAAAGAACTTGTACATTTTAAACACCATGATGTACAAATTACAGGTGAGGTAATCCGCAAAAGCGGCCATCTTAGCTTAGATATTCAATTATCTGAAAAAGGAAGAATCACTAAGGTTAACCATCTTAAACAGGCAAAATTATCTGATTATATTGGGGCTATGACTGTCGTACTTTTTGCCCCTGAAGATCTTCAATTAGTTAAAGGTGCACCTAGCCTAAGACGGAAATTTTTAGATATAGATATTGGACAAATTAAGCCAACGTACTTAGCTGAACTTTCAAATTACAATCATGTATTAAAACAAAGAAACACTTATCTAAAAACTACTAATAACGTCGACAAAACTTTTTTATCAGTCCTTGATGAACAATTAGCTGATTATGGAAGTCGTGTCATTGAACACCGTTTTGATTTTATCCAAGCCCTAAATGATGAAGCGGACAAACATCACTACATTATCAGTACTGAGTTAGAACATTTATCTATTCACTACAAATCGTCAATAGAGTTTACAGATAAGTCAAGTATTAGGGAACATTTTTTAAACCAATTATCTAAAAGCCACTCAAGAGACATCTTTAAGAAAAACACAAGCATCGGACCTCATCGTGATGATATTACTTTCTTTATTAATGATATCAATGCTACTTTTGGTAGCCAAGGGCAACAAAGAAGCCTTATTTTATCATTGAAATTAGCAGAAATTGAGCTAATAAAAACCGTTACCAACGATTATCCGATTCTCTTACTTGACGACGTCATGAGTGAACTTGACAACCATCGTCAACTAAAACTCTTAGAGGGAATCAAAGAGAATGTTCAAACATTTATTACTACAACAAGTTTAGAGCATTTAAGTGCTTTACCTGATCAACTCAAAATCTTTAATGTTAGTGATGGTACTATTAGTATTAATGAAAAAAAAGCAACAGAT

SEQ ID NO: 22346 - protein, 369 aa, Streptococcus agalactiae; identical to SEQ ID NO: 12882

SEQ ID NO: 22347 - protein, 834 aa, Streptococcus agalactiae
ATGTTTGCGTGGGGAAGTATTGGATTTGTTAGTAATAAAATTGGAGGGCGTCCAAATCAACAAACATTTGGGATGACTTTAGGAGCATTGCTATTTGCGATTATCGTATGGTTATTTAAACAGCCAGAGATGACTGCCTCATTGTGGATTTTTGGTATCTTAGGTGGTATCCTATGGTCAGTCGGCCAAAATGGTCAATTTCAAGCAATGAAATATATGGGAGTCTCTGTTGCTAATCCACTGTCAAGTGGTGCACAATTAGTAGGTGGAAGCCTAGTTGGTGCTTTAGTCTTTCATGAATGGACTAAGCCAATCCAATTTATTTTAGGATTGACAGCGTTGACATTATTAGTTATCGGCTTCTATTTCTCAAGTAAACGTGATGTCTCAGAACAAGCTTTGGCAACACATCAAGAGTTTTCAAAAGGATTTGCTACAATTGCTTATTCAACTGTAGGTTACATCTCGTACGCAGTTTTATTTAATAACATTATGAAGTTCGACGCTATGGCCGTTATTTTACCCATGGCTGTTGGAATGTGTCTAGGTGCAATTTGTTTCATGAAGTTTCGTGTTAACTTTGAGGCTGTTGTTGTTAAAAATATGATTACAGGTCTCATGTGGGGCGTTGGTAATGTCTTCATGTTATTGGCAGCAGCTAAAGCAGGGCTAGCAATTGCTTTTAGTTTTTCTCAACTTGGAGTAATTATCTCTATTATTGGTGGTATTTTATTTTTAGGTGAGACAAAAACGAAGAAAGAACAGAAATGGGTTGTCATGGGTATCCTTTGTTTTGTTATGGGTGCTATATTACTTGGTATTGTTAAATCTTAT

SEQ ID NO: 22348 - protein, 278 aa, Streptococcus agalactiae; identical to SEQ ID NO: 12884

SEQ ID NO: 22349 - protein, 659 aa, Streptococcus agalactiae
ATGAAAAATTATGGAAAAATTTTAAAAGAGTTGAGAGAAGACAAAGGTATATCCCTAAGTTCTCTAGCCAAAAGTGCTCAATTATCAAAATCAACTCTATCACGTTTTGAAAATGGTGAGACACAAATAGGTATTGATAAATTTATTAAAGCTTTACAAACGTTGGAGGTTGGGGTAACTATCAATGAAGTATCCATTCTAGATTCAAAAGTTAAGGCTGGAACTTCTAATACTGATTTAGAGCAGCTAACTTTACTAGAATCTTATCGAGATAATGAAGATATCATGAGAATTTTCAGTTTCCAAAAACAACAATCCTGTGATAGAATAGAAAGCAATGTTCTCAAAATATTGGCTAAACTTTTTATTTCAAATTTAGGGTTAAATATGAGGCTGCCTCAAGATGAGATTAACCTGGTAGTTACTTATCTGAATGGTGTGAAACAGTACAATGATTTTTATTTCAAGTCATCTGCTATTTTCAAGATATTTTACCTGAAGATGTTATTTTAAATAAGATTAGTAATATGACTAAAGAACAGTTACCTTATTCTAAATCACTGGTCAATTTATTGATAAAACAAGTCATTATAGCTTTGGAAAAAGATAGTGTTGATAAAGCTATAGTATTTGCTGATCTTGCTAATAAAGTTAGTCAA

SEQ ID NO: 22350 - protein, 220 aa, Streptococcus agalactiae
MKNYGKILKELREDKGISLSSLAKSAQLSKSTLSRFENGETQIGIDKFIKALQTLEVGVTINEVSILDSKVKAGTSNTDLEQLTLLESYRDNEDIMRIFSFQKQQSCDRIESNVLKILAKLFISNLGLNMRLPQDEINLVVTYLNGVKQYNDFYFKVICYFQDILPEDVILNKISNMTKEQLPYSKSLVNLLIKQVIIALEKDSVDKAIVFADLANKVSQ

SEQ ID NO: 22351 - protein, 591 aa, Streptococcus agalactiae
GTGGATGTCGTTAAAGTTGGTATTGGTCCAGGTTCAATTTGTACGACTCGTGTCGTTGCTGGGGTAGGTGTTCCTCAGATTACAGCTATTTACGATGCAGCGGCTGTTGCGCGTGAGTACGGTAAGACTATCATTGCTGATGGTGGTATTAAATATTCAGGTGATATTGTAAAAGCACTTGCAGCAGGTGGAAATGCAGTTATGCTAGGTTCAATGTTTGCAGGAACAGATGAAGCGCCAGGAGAAACAGAAATTTTCCAAGGGCGTAAGTTCAAGACATACCGTGGTATGGGCTCAATTGCAGCAATGAAAAAAGGTTCAAGCGATCGTTATTTCCAAGGTTCTGTAAACGAGGCTAACAAATTGGTTCCAGAAGGTATTGAAGGTCGTGTAGCATACAAAGGTTCAGTAGCCGATATTGTTTTCCAAATGCTTGGTGGCATTCGTTCTGGTATGGGATATGTAGGTGCAGCGAACATAAAAGAACTTCATGATAATGCTCAATTTGTTGAAATGTCAGGAGCTGGTTTGAAAGAAAGCCATCCCCATGATGTTCAAATTACAAATGAGGCACCAAATTATTCAGTACAC

SEQ ID NO: 22352 - protein, 197 aa, Streptococcus agalactiae
MDVVKVGIGPGSICTTRVVAGVGVPQITAIYDAAAVAREYGKTIIADGGIKYSGDIVKALAAGGNAVMLGSMFAGTDEAPGETEIFQGRKFKTYRGMGSIAAMKKGSSDRYFQGSVNEANKLVPEGIEGRVAYKGSVADIVFQMLGGIRSGMGYVGAANIKELHDNAQFVEMSGAGLKESHPHDVQITNEAPNYSVH

SEQ ID NO: 22353 - protein, 188 aa, Streptococcus agalactiae
ATGAATTTTTGGACGTCTTCCTTAGTTGCAGGGTGGCAAAGTAGGTGTAACCTTCTGATACTTTTGAACGTGCAGAAGCTTTGTTTGAAAGCAGGTGCAGATGCTATTGTCATTGATACAGCACATGGACATTCAGCTGGTGTGCTCCGTAAAATTGCTGAAATTCGTGCTCACTTCCCTAATCGCAC

SEQ ID NO: 22354 - protein, 63 aa, Streptococcus agalactiae
MNFWTSSLVAGWQSRCNLLILLNVQKLCLKAGADAIVIDTAHGHSAGVLRKIAEIRAHFPNRT

SEQ ID NO: 22355 - protein, 944 aa, Streptococcus agalactiae
ATGTCAAATTGGGATACTAAGTTTTGAAAAAAGGTTTTACTTTTGATGATGTTCTGCTTATTCCTGCTGAAAGCCATGTTTTACCAAATGAAGTTGATATGAAGACAAAGTTGGCTGATAATTTGACATTAAACATTCCAATCATTACAGCTGCAATGGATACAGTTACAGATAGTAAGATGGCTATTGCTATTGCGCGTGCTGGTGGGCTTGGTATCATTCATAAAAATATGTCAATAGTTGATCAAGCAGAAGAAGTTCGTAAAGTTAAACGCTCAGAAAATGGTGTTATTATTGACCCATTCTTCTTGACACCAGATAATACTGTCTCTGAAGCTGAGGAATTGATGCAAAACTATCGCATTAGTGGAGTTCCTATTGTAGAGACACTCGAGAATCGTAAATTAGTTGGAATTATTACTAACCGTGATATGCGTTTCATTTCTGATTATAAACAACTAATCTCAGAGCACATGACAAGTCAAAATCTTGTAACAGCTCCTATTGGTACAGATCTTGAAACTGCGGAGCGTATTCTTCATGAGCATCGTATTGAAAAGCTACCTTTAGTAGATGATGAGGGACGTCTTTCAGGACTTATTACTATTAAGGATATCGAAAAAGTTATTGAATTTCCTAAGGCAGCAAAAGATGAATTTGGACGTCTCTTAGTTGCAGGTGCAGTAGGTGTAACCTCTGATACTTTTGAACGTGCAGAAGCTTTGTGAAGCAGGCAGATGCTTGTCATTGATACAGCACATGGACATTCAGCTGGTGTGCTCCGTAAAATTGCTGAAATTCGTGCTCACTTCCCTAATCGCACATTGATTGCGGGAAATATTGCTACAGCAGAAGGAGCGCGTGCACTTTATGATGCAGGTGTGGATGTCGTTAAAGTTGGTATTGGTCCAGGTTCAATTTGTACGACTCNNNNNTTAATTAAT

SEQ ID NO: 22356 - protein, 316 aa, Streptococcus agalactiae
  VARIANT 312, 313: Xaa = Any Amino Acid
MSNWDTKFLKKGFTFDDVLLIPAESHVLPNEVDMKTKLADNLTLNIPIITAAMDTVTDSKMAIAIARAGGLGIIHKNMSIVDQAEEVRKVKRSENGVIIDPFFLTPDNTVSEAEELMQNYRISGVPIVETLENRKLVGIITNRDMRFISDYKQLISEHMTSQNLVTAPIGTDLETAERILHEHRIEKLPLVDDEGRLSGLITIKDIEKVIEFPKAAKDEFGRLLVAGAVGVTSDTFERAEALLKQGRCYVIDTAHGHSAGVLRKIAEIRAHFPNRTLIAGNIATAEGARALYDAGVDVVKVGIGPGSICTTXXLIN

SEQ ID NO: 22357 - protein, 483 aa, Streptococcus agalactiae
ATGAATAAAAAAGAAACAAGACACCAATTAATTCGTTCCTTAGTCTCTGAGACTAAGGTGCGTACACAACATGAGTTAAGGGAATTACTAGAAAAAAATGGCGTTTCAGTGACGCAAGCAACATTATCTCGAGATATGAAAGAACTTAATTTAATTAAGGTTAACGAAAGCAGTGATAATGCTACAGAAACTTATTATGAGATTCATAGTATATCTCAGAAGCGTTGGGAAGAACGGTTACGTTTTTACATGGAAGATGCCCTAGTCATGCTGTTTCCAGTTCAAAATCAAATCGTTTTGAAGACACTACCTGGCCTAGCTCAATCTTTTGGCTCCATATTAGATTCGATTTTATTACCTGAGATTTTAGCAACTGTCTGTGGTGATGATACTTGTTTGATTATTTGTAATAATAGTGAAGAAGCTCAAAAGTGTTTTGAGAAATTAAGTCAGTATACGCCGCCTTTCTTCTTCTCAAAAAAA

SEQ ID NO: 22358 - protein, 161 aa, Streptococcus agalactiae; identical to SEQ ID NO: 8596

SEQ ID NO: 22359 - protein, 678 aa, Streptococcus agalactiae
GTGATTACAAAAGAACAATATTTTTATTTCAGACAACTAGATGATTTTAAACACTTTACTATTGAACAATTTGACCATATTGTGAGCCACATTAAACATCGTACAGCTCTAAAAAATCATACCTTATTTTTTGAAGGTGATTACCGTGAAAAACTGTTTTTAATCCAGTCAGGACATGTAAAAATTGAACAATCAGACGCTTCTGGTTCTTTTATTTATACAGATTATGTTAGACAAGATACAGTTTTTCCTTATGGAGGTCTCTTTTTGGATGATGATTACCATTTTTCAGCAGTAGCTATTACGGATATTGAGTATTTTTCTCTGCCAATGGCTTTATACGAAGAATACTCTCTTCAAAATATCAATCAAATGAAGCATCTTTGTCGGAAATATTCTAAGCTATTACGAGTTCATGAAATACGACTTCGTAATATGGTGACTTCAAGTGCCAGTATGAGAGTTATCCAATCGCTTGCAACTCTACTTTTGCAAGTTCCTACAGAAAGGGGACATTTACCTTTTCCTATTACAACGATTGAAATTGCCAATATGAGCGGAACTACTCGCGAGACAGTTAGTCATGTTTTAAAGGAATTACGCCAAAAAGATATCGTTGAAATGAAAGGAAAGAAACTTCTCTATAATAATAAAAATTATTTCAAGAAATTCATTGAA

SEQ ID NO: 22360 - protein, 226 aa, Streptococcus agalactiae; identical to SEQ ID NO: 12892

SEQ ID NO: 22361 - protein, 510 aa, Streptococcus agalactiae
ATGACTAAATTTATTGTTGATTCATCGTACTGGAATTTGTTTCCAACTTCTAAGATTGGGGTAATCTTAATCAAAGATTATCACATGGACAGGAACCTTGAAACAGAACTTAAACAGTTACTGTCTGATAGTTATTCTTTAGCAAAAAAATATTTGCAAGAGAAAGAATTCAGTCAAAACAGAGTTATCCAAACTTATCGCAAAGCATATCAAACCTTTAAAACTAAAAAAGGTGCACGTTCAAGTATCGAAGCATTATTGAAGCGAGTTAATTCAGGAAACGAAATTACTAGTATAAATCCTCTAGTTGATATCTATAATGCCGCTAGCCTTAGGTTTGGATTACCTATTGGTGCTGAAGATAGTGATACATTTAGCGGTGATTTAAAACTAACTATTACCAATGGTGGTGATGAATTTTACTTGATTGGCGAAGATTTTAACAGACCAACTCTTTCAGGTGAGCTTGCCTATGTTGATGATGTTGGAGCAGTTTGCCGCTGTTTTAAT

SEQ ID NO: 22362 - protein, 170 aa, Streptococcus agalactiae
MTKFIVDSSYWNLFPTSKIGVILIKDYHMDRNLETELKQLLSDSYSLAKKYLQEKEFSQNRVIQTYRKAYQTFKTKKGARSSIEALLKRVNSGNEITSINPLVDIYNAASLRFGLPIGAEDSDTFSGDLKLTITNGGDEFYLIGEDFNRPTLSGELAYVDDVGAVCRCFN

SEQ ID NO: 22363 - protein, 171 aa, Streptococcus agalactiae
ATGATTACCGATAATACTCAGAACGCTTTTTTAGTTATCGAATTAATTAATAATAGAAGAGAAATTATTTTTAAAGAAGCGTTGGACTTTATCGCCACCAATACAAATCGCTTTCTAAATGCTAAAACACAGACCATCATATTAGATAAAGAACACAGTGAAATAACGCTA

SEQ ID NO: 22364 - protein, 57 aa, Streptococcus agalactiae
MITDNTQNAFLVIELINNRREIIFKEALDFIATNTNRFLNAKTQTIILDKEHSEITL

SEQ ID NO: 22365 - protein, 1228 aa, Streptococcus agalactiae
ATGACTCAAACACATCCAATTCATGTTTTCTCAGAAATTGGAAAACTTAAAAAAGTTATGCTACACCGTCCAGGTAAAGAAATAGAAAATCTGATGCCTGATTATTTAGAGAGACTCTTGTTTGATGATATCCCATTTTTGGAAGATGCACAAAAAGAACACGATGCGTTTGCACAAGCACTTCGCAACGAAGGAGTCGAAGTACTTTACCTTGAAAATCTTGCTGCCGAGTCGTTAACAAACCAAGAAATTCGTGAACAGTTTATCGATGAGTACATTGGCGAAGCAAATGTTCGCGGTCGTGCTACTAAAAAAGCTATTCGAGAATTATTACTCAATATCAAAGATAATAAAGAACTTATCGAAAAAACTATGGCAGGTATCCAAAAGTCTGAGCTACCTGAAATCCCATCTTCTGAAAAAGGTCTAACTGATCTTGTCGAATCTAATTATCCATTTGCCATAGATCCGATGCCAAATCTTTACTTTACACGTGATCCATTTGCAACTATTGGGAATGGAGTTTCATTAAACCATATGTTCTCTGAAACACGTAATCGCGAAACTTTATACGGTAAATATATCTTTACACATCACCCAGAGTACGGTGGAAAAGTCCCTATGGTCTATGATCGTGAAGAAACAACTCGTATTGAAGGTGGAGATGAGCTCGTCCTTTCTAAAGACGTCCTTGCCGTGGGTATCTCTCAACGTACTGATGCTGCCTCTATTGAAAACTCTTAGTCAATATTTTTAAACAAAATTTAGGTTTTAAAAAGGTTTAGCATTTGAATTTGCAAATAATCGTAAATTTATGCACCTTGACACAGTCTTTACAATGGTTGACTATGACAAGTTTACAATTCACCCAGAAATTGAAGGCGATCTTCGCGTTTACTCTGTAACTTACGAAAACCAAGATCTTCATATTGAAGAAGAAAAAGGTGATTTGGCAGTTCTTCTAGCGAAAAACCTAGGAGTTGAGAAAGTGGAATTGATTCGTTGCGGGGGTGACAACTTAGTCGCTGCTGGACGTGAACAATGGAATGATGGTTCAAATACATTAACTATAGCACCAGGTGTCGTTGTCGTTTACAACAGAAATACAATCACAAATGCAATCTTAGAGTCCAAAGGATTGAAATTAATTAAGATTAATGGAAGTGAATTAGTTCGTGGGCGTGGTGGACCACGCTGCATGTCAATGCCATTTGAACGTGAAGACCTT

SEQ ID NO: 22366 - protein, 410 aa, Streptococcus agalactiae
MTQTHPIHVFSEIGKLKKVMLHRPGKEIENLMPDYLERLLFDDIPFLEDAQKEHDAFAQALRNEGVEVLYLENLAAESLTNQEIREQFIDEYIGEANVRGRATKKAIRELLLNIKDNKELIEKTMAGIQKSELPEIPSSEKGLTDLVESNYPFAIDPMPNLYFTRDPFATIGNGVSLNHMFSETRNRETLYGKYIFTHHPEYGGKVPMVYDREETTRIEGGDELVLSKDVLAVGISQRTDAASIEKLLVNIFKQNLGFKKVLAFEFANNRKFMHLDTVFTMVDYDKFTIHPEIEGDLRVYSVTYENQDLHIEEEKGDLAVLLAKNLGVEKVELIRCGGDNLVAAGREQWNDGSNTLTIAPGVVVVYNRNTITNAILESKGLKLIKINGSELVRGRGGPRCMSMPFEREDL

SEQ ID NO: 22367 - protein, 429 aa, Streptococcus agalactiae
ATGAAGCTATTAGTCAATCACTTGCCTTACCAAAGAGCTGCAAGCCTATATATTCGCTTTTCTGTTTTCGTTATCGAAAGAAATATAAAAATGGAAGAAGAATTCGATGATAATGACGAGCAAGATACTATTTATGCTGTTCTTTATGATGGGAAACAGCCAGTTTCAACAGGACGCTTTCTTCCTGAAACTCAAACAGAAGCTCGTTTGACTCGAATTGCGACTTTAAAAGGTTATCGTGGTAACGGCTATGGTACCAAAATTATTATAGCACTAGAAAATTATGCAAAAGAAAATGGTTATCACTATCTAACTATACATGCTGAATTGACAGCAAAAGATTTCTACCAGACACTTGGGTATCAAGCTATTGGGAATATTTATATGGAAGACGGGGAATCCTGTCAAACACTCGAAAAATATTTAATT

SEQ ID NO: 22368 - protein, 143 aa, Streptococcus agalactiae
MKLLVNHLPYQRAASLYIRFSVFVIERNIKMEEEFDDNDEQDTIYAVLYDGKQPVSTGRFLPETQTEARLTRIATLKGYRGNGYGTKIIIALENYAKENGYHYLTIHAELTAKDFYQTLGYQAIGNIYMEDGESCQTLEKYLI

SEQ ID NO: 22369 - protein, 1011 aa, Streptococcus agalactiae
ATGACACAAGTATTTCAAGGACGTAGTTTCTTAGCAGAAAAAGATTTTTCTCGTGAGGAATTTGAATATCTTATTGATTTTTCAGCTCATTTAAAAGACCTTAAAAAACGTGGTGTTCCTCATCACTATCTTGAAGGTAAAAATATTGCTCTCTTATTTGAAAAAACATCTACTCGTACTCGCGCAGCCTTTACAACTGCAGCAATTGACCTAGGCGCTCATCCGGAATACCTTGGTGCAAATGATATTCAACTTGGCAAAAAAGAATCAACAGAAGATACTGCTAAGGTTTTAGGGCGTATGTTTGATGGTATTGAATTCCGTGGTTTTAGCCAAAGAATGGTTGAAGAGCTTGCTGAATTTTCTGGAGTACCTGTTTGGAATGGTTTAACAGATGAATGGCATCCAACACAAATGCTAGCTGACTACCTTACTATCAAAGAAAACTTCGGTAAACTTGAAGGTATTACTCTTGTTTACTGTGGTGACGGACGTAACAACGTTGCCAACTCACTTTTAGTGGCTGGGACTTTGATGGGGGTCAATGTACACATCTTTTCTCCAAAAGAACTTTTCCCTGCTGAAGAGATTGTTAAATTGGCTGAAGGATATGCCAAAGAATCTGGGGCTCACGTTCTCGTTACTGATAATGTAGACGAAGCTGTAAAGGGAGCAGATGTCTTTTACACTGATGTCTGGGTATCGATGGGAGAAGAAGATAAGTTCAAAGAACGCGTTGAACTTCTTCAACCATATCAAGTAAACATGGATCTGATTAAAAAAGCTAATAATGATAATCTTATCTTCTTACACTGCTTACCTGCATTCCATGATACAAATACCGTTTACGGCAAAGACGTCGCTGAAAAATTTGGCGTCAAGGAAATGGAAGTTACTGATGAAGTCTTCCGTAGCAAATATGCCCGTCATTTCGACCAAGCTGAAAATCGTATGCACACTATTAAAGCTGTAATGGCTGCAACCCTTGGAAATCTTTTCATTCCAAAAGTT

SEQ ID NO: 22370 - protein, 337 aa, Streptococcus agalactiae; identical to SEQ ID NO: 12900

SEQ ID NO: 22371 - protein, 1425 aa, Streptococcus agalactiae
ATGGAAAAAGAAAAAAAATTAGGTCTTTTACCACTAACAATGCTTGTCATTGGCTCTCTTATCGGTGGCGGAATCTTTGATTTAATGCAAAATATGAGTTCCAGAGCCGGTTTGGTACCAATGCTTATTGCTTGGGTAATTACTGCTATCGGGATGGGAACTTTCGTTTTAAGTTTTCAAAATTTATCTGAAAAAAGGCCGGACCTAACAGCTGGAATCTTTAGTTACGCTAAAGAGGGGTTTGGAAACTTTATGGGATTTAACTCTGCATGGGGTTATTGGTTATCAGCTTGGCTTGGAAACGTTGCCTACGCTGCACTCTTATTCAGTTCACTCGGTTATTTCTTTAAATTCTTTGGTAATGGAAATAATATCATTTCAATTATTGGAGCAAGTATAGTTATTTGGGTTGTCCATTTCTTAATTTTAAGAGGTGTTAATACAGCTGCATTTATTAATACCATAGTTACCTTTGCAAAATTAGTACCTGTTATTATTTTCTTAATTTCAGCGTTATTAGCTTTCAAATTTAACATTTTTAGTCTTGATATCTGGGGAAATGGATTACATCAATCAATTTTTAACCAAGTCAATTCAACTATGAAAACCGCTGTTTGGGTATTTATTGGTATTGAGGGCGCCGTTGTCTTCTCAGGTCGTGCTAAAAAACACTCTGATATTGGTAAAGCAAGTATCCTAGCATTATTCACTATGATTTCACTTTATGTATTGATTTCTGTTTTATCACTTGGTATCATGTCACATCCAGAACTTGCAAACTTAAAAACACCAGCTATGGCTTACGTTCTAGAAAAGGCTGTTGGTCACTGGGGCGCTATCTTAGTTAACCTTGGTGTTATCATTTCAGTATTTGGCGCTATTCTTGCTTGGACTTTATTTGCAGCAGAATTACCATATCAAGCTGCTAAAGAAGGTGCTTTTCCTAAATTCTTTGCAAAAGAAAATAAAAACAAAGCTCCAATCAACTCACTCTTAGTCACTAATCTTTGTGTACAAGCATTCTTAATCACGTTCTTATTCACACAAAGTGCTTATCGTTTTGGTTTCGCATTAGCATCATCTGCTATCTTAATTCCTTATGCTTTTACAGCACTATATCAATTACAATTCACACTCCGTGAGGATAAGGCAACTCCAGGACATCAAAAGAATTTAATTATCGGTATCCTCGCTACAATCTATGCTGTTTACCTTATCTATGCTGGTGGTTTTGATTACTTACTTTTGACAATGATTGCTTACACTCTAGGTATGATTCTCTATATTAAAATGAGAAAAGATGACAAGCTTCCTATCTTTGTGGGATATGAAAAAATTAGTGCCATTGTCATTCTAGCGCTTTGCTTACTATGTATTATTGAAATTATGACTGGACAAATTGACATTGCTGCAATCCTAGCAGGT

SEQ ID NO: 22372 - protein, 475 aa, Streptococcus agalactiae
MEKEKKLGLLPLTMLVIGSLIGGGIFDLMQNMSSRAGLVPMLIAWVITAIGMGTFVLSFQNLSEKRPDLTAGIFSYAKEGFGNFMGFNSAWGYWLSAWLGNVAYAALLFSSLGYFFKFFGNGNNIISIIGASIVIWVVHFLILRGVNTAAFINTIVTFAKLVPVIIFLISALLAFKFNIFSLDIWGNGLHQSIFNQVNSTMKTAVWVFIGIEGAVVFSGRAKKHSDIGKASILALFTMISLYVLISVLSLGIMSHPELANLKTPAMAYVLEKAVGHWGAILVNLGVIISVFGAILAWTLFAAELPYQAAKEGAFPKFFAKENKNKAPINSLLVTNLCVQAFLITFLFTQSAYRFGFALASSAILIPYAFTALYQLQFTLREDKATPGHQKNLIIGILATIYAVYLIYAGGFDYLLLTMIAYTLGMILYIKMRKDDKLPIFVGYEKISAIVILALCLLCIIEIMTGQIDIAAILAG

SEQ ID NO: 22373 - protein, 954 aa, Streptococcus agalactiae
TTGGTAAAAGAACATCAAAAAATCGTAGTTGCCTTAGGTGGTAACGCTATTCTATCAACAGATGCTTCAGCAAAAGCACAACAAGAAGCATTAATCAACACATCAAAATCACTGGTCAAACTGATTAAAGAAGGCCATGATGTCATTGTTACTCATGGAAATGGTCCCCAAGTTGGTAACTTATTGCTACAGCAAGCAGCTGCAGATTCTGAAAAAAATCCAGCAATGCCTTTGGATACTTGTGTTGCCATGACAGAAGGAAGTATTGGTTTTTGGTTACAAAATGCTCTTAACAATGAATTACAAGAACAAGGCATTGACAAAGAGGTTGCAACAGTGGTAACTCAAGTTATTGTTGATGAAAAAGATCAAGCTTTCACTAATCCAACAAAACCTATTGGCCCATTCTTATCTGAAGAAGATGCCAAGAAACAAGCCCAAGAAACAGGTTCAAAATTTAAAGAAGATGCTGGCCGTGGATGGCGTAAAGTCGTTCCTTCACCAAAACCGGTTGGTATCAAAGAAGCTTCTGTTATTAGACGGTTAGTGGACTCTGGTGTGGTTGTTATTAGCGCAGGTGGCGGAGGTGTACCAGTTATTGAAGATGCTAATACAAAGGCATTAAAAGGGGTTGAAGCTGTTATTGACAAAGACTTTGCCAGTCAAACTTTATCAGAACTTGTTGATGCCGACTTATTCATCGTCTTAACTGGCGTTGACAACGTTTTTGTTAATTTTAATAAACCTAATCAAGAAAAATTAGAAGAAGTTACTGTTTCACAAATGAAACAATATATCACTGAAAATCAATTTGCCCCTGGCAGTATGCTACCAAAGGTAGAAGCTGCGATTGCTTTTGTTGAAAATAAACCAGAAGCGCGTGCTATCATTACTTCACTTGAAAATATTGATAATGTCTTAGCAGAAAATGCAGGGACACAAATTATTGCAAAT

SEQ ID NO: 22374 - protein, 318 aa, Streptococcus agalactiae
MVKEHQKIVVALGGNAILSTDASAKAQQEALINTSKSLVKLIKEGHDVIVTHGNGPQVGNLLLQQAAADSEKNPAMPLDTCVAMTEGSIGFWLQNALNNELQEQGIDKEVATVVTQVIVDEKDQAFTNPTKPIGPFLSEEDAKKQAQETGSKFKEDAGRGWRKVVPSPKPVGIKEASVIRRLVDSGVVVISAGGGGVPVIEDANTKALKGVEAVIDKDFASQTLSELVDADLFIVLTGVDNVFVNFNKPNQEKLEEVTVSQMKQYITENQFAPGSMLPKVEAAIAFVENKPEARAIITSLENIDNVLAENAGTQIIAN

SEQ ID NO: 22375 - protein, 1023 aa, Streptococcus agalactiae
ATGACAAAACCAATTATCTTAACAGGTGATAGACCGACAGGAAAGTTGCATATTGGACATTATGTAGGTAGCTTAAAAAATAGAGTTCTACTTCAAAATGAGGGTAGCTATACTTTATTTGTCTTTTTAGCAGACCAACAAGCACTGACAGACCATGCTAAAGATCCGCAAACTATTGTTGAATCAATTGGTAATGTTGCACTTGATTATTTAGCTGTTGGGCTAGATCCAAACAAGTCGACTTTATTCATTCAAAGTCAAATTCCTGAGTTAGCAGAATTAAGTATGTATTATATGAACTTGGTTTCACTTGCACGTTTGGAACGTAATCCAACTGTAAAAACAGAAATTGCTCAAAAAGGTTTTGGTGAGTCTATTCCAGCAGGATTCTTAGTTTATCCTGTTGCACAAGCAGCTGATATAACCGCTTTTAAAGCTAACCTTGTTCCTGTAGGGACTGACCAAAAACCAATGATTGAACAAACACGTGAAATAGTTAGATCTTTCAATCATGCTTATAATTGTCAGGTTTTAGTTGAACCAGAAGGAATCTATCCAGAAAATGATGCAGCAGGTCGTCTGCCAGGGTTAGATGGTAATGCAAAAATGTCTAAGTCATTAAATAATGGAATCTTTTTAGCAGATGATATGGATACAGTTAAGAAAAAAGTTATGAGCATGTATACTGATCCAAACCATATTAAAGTAGAAGAACCAGGACAAATCGAAGGTAATATGGTATTCCATTACCTTGATGTTTTTGGAAGAGATGAAGACCAAAAAGAGATTACTGCTATGAAAGAACACTATCAAAAAGGTGGACTTGGAGATGTTAAAACAAAACGTTATCTACTTGATATCTTAGAGCGTGAATTATCACCTATTAGAGAACGTCGCCTTGAATATGCTAAAGATATGGGACAAGTTTATCAAATGTTACAAAAAGGTAGTGAGAAAGCTCAAGCTGTTGCAGCCTCTACTTTGGATGAGGTTAAATCAGCCATGGGTTTGAACTATTTTAAA

SEQ ID NO: 22376 - protein, 341 aa, Streptococcus agalactiae; identical to SEQ ID NO: 3914

SEQ ID NO: 22377 - protein, 387 aa, Streptococcus agalactiae; identical to SEQ ID NO: 6711

SEQ ID NO: 22378 - protein, 129 aa, Streptococcus agalactiae; identical to SEQ ID NO: 882

SEQ ID NO: 22379 - protein, 381 aa, Streptococcus agalactiae; identical to SEQ ID NO: 6713

SEQ ID NO: 22380 - protein, 127 aa, Streptococcus agalactiae; identical to SEQ ID NO: 880

SEQ ID NO: 22381 - protein, 645 aa, Streptococcus agalactiae
ATGCGCAGAGATGATATTATAATGCCACAAGATGGAAGAAAAATGGCTGTATTATTGGGTTTTATTGGTGGTTTTATTGACGTTTATAGTCACATGCAGTTTCACTCCCTTGTTGCAACACAGACAGGTAATATTATCTTGATGGTGGCAAATCTCGGACAAAATGATTTTCACTTTTTTATCACTAAATTATTTTCTATTTTCTTTTTTTCAATTGGTTTTTTGGTTGGTATTGTGATTAAAGAACGTGCAGTAACAGCTTTTTGGCGTCTATATGCATTATGTCCCCTTTTACTTTCTACGATGTTTATTCCTTTTGTTGAAAATGTAAACCACAATATCTGGGTAGCTTTATTAGCCTTTAGCACAGGTATTTTAATGTTGACATTTTCAGGAAGTCGCATTGAATCTGAACCATATACTATCTTAATGACTTCTGGTAATTATCGGAAAATGCTACAATTTTGGTATGAGTATATTGTTAATCGTCAGAGAACGGCTATGCAAAAAAGACGAGCTATCAATTATTCACTGGTAGTTCTAGCATTTATTATTGGAGCATTGGTAGCTGCAATAGTTTACGATATCTTTGCATATAGAGCTATTTTAGGTGTGACGATAACGCTTTTAATTATTATGATTCAT

SEQ ID NO: 22382 - protein, 215 aa, Streptococcus agalactiae
MRRDDIIMPQDGRKMAVLLGFIGGFIDVYSHMQFHSLVATQTGNIILMVANLGQNDFHFFITKLFSIFFFSIGFLVGIVIKERAVTAFWRLYALCPLLLSTMFIPFVENVNHNIWVALLAFSTGILMLTFSGSRIESEPYTILMTSGNYRKMLQFWYEYIVNRQRTAMQKRRAINYSLVVLAFIIGALVAAIVYDIFAYRAILGVTITLLIIMIH

SEQ ID NO: 22383 - protein, 870 aa, Streptococcus agalactiae
ATGTCTAAAAAAATTAAGAATTTTATACTATTAAATATTGGATCTCTAATTGTTGCATTTGGTTTCAACGCTTTCTTTCTTCATAATCATATTGTCACGGGGGGGATTAGTGGTTTGGCAGTTAGTTTTCATGAAGTATTTGGTTGGGATTCTGCTTTTTTTATTATGATTATCAATATTCCATTGCTCCTTCTTTGCTACTTTGGCTTAGGTAAACAAACCTTTTTAAAAACTGTCTATGGTTCTTGGATTTTTCCTGTTTTTATTAAGTTAACACAAAGTGTACCAACTTTGACCCACAACCCACTCCTCGCAGCACTTTTTGGAGGTGTTATTGTAGGATGTGGTTTGGGGATTGTTTTTTGGAGCGACTCTTCAACTGGTGGAACGGGGATTATCATTCAATTCTTAGGAAAATATACTCCTATAAGCCTTGGACAAGGGGTTATATTGATTGATGGACTTGTTACAATTGTTGGTTTCCTAGCTTTTGACAGTGATACGGTTATGTTTTCTATTATTGGGTTGATAACTATTAGTTATATTATTAATGCTATCCAAACTGGTTTTACAACCTTAAGCACTGTCTTAATCGTTTCTCAAGAGCACCAAAAAATTAAGACATATATCAATACTGTCGCAGATAGAGGAGTAACAGAAATTCCCGTTAAAGGGGGATATTCTGGAACTAATCAAATCATGCTTATGACAACTATTGCTGGTTATGAGTTTGCTAAATTACAAGAGGCAATAGCAGAAATTGACGAAACAGCCTTCATAACAGTAACTCCAACATCACAAGCTTCTGGACGTGGATTTAGTCTTCAAAAAAATCATGGACGTCTTGATGAAGACATTCTTATGCCAATG

SEQ ID NO: 22384 - protein, 290 aa, Streptococcus agalactiae; identical to SEQ ID NO: 2

SEQ ID NO: 22385 - protein, 1617 aa, Streptococcus agalactiae
TTGCTTACAGTTTCAGATGTTTCACTACGTTTTAGTGATCGCAAATTATTTGATGAAGTTAACATTAACTTTACAGCAGGAAATACCTATGGTCTTATCGGAGCAAATGGCGCTGGTAAATCAACTTTCCTTAAAATTTTAGCTGGTGATATTGAACCAACAACAGGACATATTGCACTTGGCCCAGATGAACGCCTTTCTGTACTTCGCCAAAATCATTTTGATTATGAAGATGAGCGCGTCATTGATGTCGTTATCATGGGTAATGAAACACTTTATAGTATCATGAAAGAAAAGGATGCTATCTACATGAAAGAAGATTTTTCTGATGAAGATGGTGTTCGCGCTGCGGAATTAGAAGGAGAATTTGCTGAACTCGGTGGATGGGAGGCTGAAAGTGAGGCTTCTCAATTACTCCAAAATCTAAATATTTCAGAAGAGCTTCATTATCAAAATATGAGTGAACTAGCTAATGGAGACAAAGTTAAAGTTCTCCTTGCAAAAGCTCTCTTTGGTAAACCAGATGTACTTCTCCTTGACGAGCCTACCAATGGACTTGATATCCAGTCTATTACTTGGTTAGAAGATTTCTTGATTGACTTTGAAAATACAGTTATTGTAGTTTCCCACGACCGTCATTTCTTGAATAAAGTATGTACACATATGGCTGACCTTGATTTTGGAAAAATTAAACTGTTCGTCGGTAACTATGATTTCTGGAAAGAATCATCAGAATTAGCAGCTCGTTTACAAGCTGATCGTAATGCTAAAGCAGAAGAAAAAATTAAACAACTTCAAGAATTCGTTGCACGATTTTCAGCGAATGCTTCAAAATCAAAACAAGCAACTTCTCGTAAAAAAATGCTTGATAAAATTGAACTTGAAGAGATTGTACCATCAAGCCGTAAATACCCATTCGTTAACTTTAAAGCCGAACGCGAAATGGGAAATGATTTATTGACCGTTGAAAATCTCTCTGTCACTATTGATGGGGAAAAAATCCTTGATAATATCAGTTTCATTCTTCGTCCTGGTGATAAAACTGCACTTATTGGACAAAATGATATCCAAACTACTGCACTTATTCGAGCATTGATGGGGGATATTGAATATGAAGGAACAATCAAATGGGGAGTAACAACTAGTCGTTCTTACCTTCCAAAAGACAATTCACGAGACTTTGCTTCTGGCGAGTCAATCTTAGAATGGCTTCGTCAATTTGCTAGTAAAGAAGAAGACGATAATACCTTCTTACGTGGTTTCCTAGGTCGTATGCTTTTCTCTGGAGATGAGGTTAACAAATCTGTTAATGTCTTATCTGGGGGTGAAAAAGTACGCGTTATGCTTTCGAAATTAATGCTATTAAAATCTAATGTTCTTGTTCTTGATGATCCAACAAACCACTTAGATTTGGAATCTATTTCAAGTCTCAACGATGGACTAAAAGATTTCAAAGAATCTATTATTTTTGCAAGTCATGACCACGAGTTTATTCAAACTTTAGCGAACCATATTATTGTTCTTTCTAAAAACGGAGTTATCGATCGTATCGATGAAACTTACGATGAATTTCTTGAAAATACCGAAGTACAAGCTAAGGTCGCTCAACTCTGGAAA

SEQ ID NO: 22386 - protein, 539 aa, Streptococcus agalactiae; identical to SEQ ID NO: 4

SEQ ID NO: 22387 - protein, 2577 aa, Streptococcus agalactiae
ATGACAATTAACCACTATAAGCTTCGTATACCTTACTATACAATAAGCTTTCTACTTCCCTTCATAATCATAGTCTGTATCCTCTTTACTAAGAATATTTATTGGGGAAGTCCAACAACCATATTAGCAAGCGATGGCTTTCATCAATATGTTATCTTTAATCAAGCATTAAGAAATATTCTTCATGGTTCAAACAGCTTATTCTATACCTTTACAAGCGGTTTAGGTTTAAATTTTTATGCTCTGAGTAGTTACTATTTGGGAAGTTTTTTATCCCCAATAGTTTATTTCTTTAACCTAAAAAATATGCCTGATGCTATCTACCTTTTAACAATATGTAAAATAGGGTTGATAGGTTTGTCAATGTTTGTCACTCTTTGTAAACGTCATTGTAAAGTTAATCGTGTCTTACTTTTAGTAATTTCTACTTGCTATAGCTTAATGAGTTTCTTAATTAGCCAAATTGAAATTAATATGTGGCTAGATGTATTTATTCTAATTCCCCTTGTTGTTTTAGGAGTTGATCAGCTACTATGGGAAAGAAAACCTATACTTTATTTCCTCTCTCTGACAGCCTTATTCATCCAAAACTATTATTTTGGTTTTATGACTGCCATCTTTACTAGCCTTTACTTCATCGTACAAATAACCCGTAATACTGATAGTAAGGTTGCATTTAAACAATTTCTTCATTTTACCTTTTTATCTCTTTTAGCTGGTATGACTAGTAGCATTATGATTTTGCCAACTTATTTTGATTTAACTACTCATGGTGAAAAGTTGACAAAGGTATCGAAGATGTTTACAGAAAATTCTTGGTACATGGATTTGTTTGCTAAAAATATGATTGGAGCCTATGATACAACAAAATTTGGCTCTATTCCTATGATTTATGTAGGTTTACTTCCTTTACTCCTTTCTTTACTTTACTTTACAATAAAGGAAGTTCCTCGAAGGACTAGATTAGCATATGGATTTTTACTAATATTTGTTATTGCTAGTTTTTATATAACACCTCTAGATTTATTTTGGCAAGGGATGCATGCTCCAAATATGTTTCTCCATCGCTACTCTTGGGTACTTTCAGTACTTATCTGTCTGCTAGCTGCTGAATGCCTTGAGTATTTAGACAACATTTCTTGGAAAAAGATTTTAGGGGTCAATTTAATTTTAGTAAGTGGTTTCATAATCACGTTTTTATTTAAAAAGCATTATCATTACCTTAATCTTGAATTACTTCTTTTAACCTTAACTTTCCTCTCAGCTTATATTATTCTAACTATTAGTTTTGTCAGTAAGCAAATACCTAAACTAGTTTTTTATCCCTTTCTTATTGGTTTTGTTGTGTTAGAGATGACTTTAAACACTTTTTACCAACTAAATAGTCTTAACGATGAGTGGGTATTTCCATCTAGGCAAGGATATGCTAAATATAATCACAGCATTAGCAAACTTGTCAGAAAGACTGAGAGAAATAACTCTACATTCTTCCGTACAGAGCGCTGGTTAGGACAAACCGGCAACGACTCTATGAAATATAATTATAATGGTATTTCACAATTTTCATCTATTAGAAATCGTTCTTCAAGTCAAGTGCTTGATAGACTTGGCTTCAAATCAGATGGTACAAATTTAAATTTACGTTATCAAAATAATACTTTGATCGCAGATAGTCTATTTGGTGTAAAGTATAACCTTACAGAATATCCTTTTGATAAATTTGGTTTTATCAGAAAAGCTCAAGATAAACAAACCATTCTTTACGAAAATCAGTTTGCCAGTCAATTAGCTATACTAACGAATCAAGTATATCAAGATAAAACATTTACTGTGAATACTTTGGATAATCAGACAACTCTTTTAAATCAATTAAGTGGTTTGAAAGAGACGTATTTTGAGCATCTTATTCCAAATAGCGTTTCTGGGCAAACCACTCTTAATAAACAAGTATTTGTTAAAAAGAATAAACAAGGGAATACTGAAATTACCTATAACATAACTATCCCTAAAAACAGTCAGTTATATGTTAGTATGCCGTTTATAAATTTTAATAATGAGGAAAATAAAATTGTTCAAATCTCCGTTAATAATGGACCATTTGTACCTAATACTCTTGATAATGCTTATTCATTTTTTAATATTGGTTCCTTTGCTGAAAACAGTCGTATCAAAGTAAAATTTCAATTTCCACACAATGATCAAGTTTCTTTCCCAATTCCCCACTTTTATGGGCTCAAGTTAGAAGCTTATAAAAAAGCTATGACTGTTATTAATAAACGAAAAGTAAAAGTAAGAACTGATCACAATAAAGTTATTGCTAATTATACAAGTCCTAATAGAAGTTCTCTTTTCTTCACTATTCCCTATGATAGAGGTTGGAAAGCTTATCAAAATAATAAAGGAATAAAAATTTTCAAAACTCAGAAAGGTTTTATGAAAATAAATATTCCTAAAGGAAAAGGCAAAGTAACATTAATTTTTATCCCTTACGGCTTTAAATTTGGGGTAGGCCTATCTATTACTGGAATAGTATTATTTACTGTCTATTATTTAAAATTTGGAAAAAATAAAATAGGA

SEQ ID NO: 22388 - protein, 859 aa, Streptococcus agalactiae
MTINHYKLRIPYYTISFLLPFIIIVCILFTKNIYWGSPTTILASDGFHQYVIFNQALRNILHGSNSLFYTFTSGLGLNFYALSSYYLGSFLSPIVYFFNLKNMPDAIYLLTICKIGLIGLSMFVTLCKRHCKVNRVLLLVISTCYSLMSFLISQIEINMWLDVFILIPLVVLGVDQLLWERKPILYFLSLTALFIQNYYFGFMTAIFTSLYFIVQITRNTDSKVAFKQFLHFTFLSLLAGMTSSIMILPTYFDLTTHGEKLTKVSKMFTENSWYMDLFAKNMIGAYDTTKFGSIPMIYVGLLPLLLSLLYFTIKEVPRRTRLAYGFLLIFVIASFYITPLDLFWQGMHAPNMFLHRYSWVLSVLICLLAAECLEYLDNISWKKILGVNLILVSGFIITFLFKKHYHYLNLELLLLTLTFLSAYIILTISFVSKQIPKLVFYPFLIGFVVLEMTLNTFYQLNSLNDEWVFPSRQGYAKYNHSISKLVRKTERNNSTFFRTERWLGQTGNDSMKYNYNGISQFSSIRNRSSSQVLDRLGFKSDGTNLNLRYQNNTLIADSLFGVKYNLTEYPFDKFGFIRKAQDKQTILYENQFASQLAILTNQVYQDKTFTVNTLDNQTTLLNQLSGLKETYFEHLIPNSVSGQTTLNKQVFVKKNKQGNTEITYNITIPKNSQLYVSMPFINFNNEENKIVQISVNNGPFVPNTLDNAYSFFNIGSFAENSRIKVKFQFPHNDQVSFPIPHFYGLKLEAYKKAMTVINKRKVKVRTDHNKVIANYTSPNRSSLFFTIPYDRGWKAYQNNKGIKIFKTQKGFMKINIPKGKGKVTLIFIPYGFKFGVGLSITGIVLFTVYYLKFGKNKIG

SEQ ID NO: 22389 - protein, 477 aa, Streptococcus agalactiae
ATGAAATTAAAAATAATTACAGTTGGAAAATTGAAAGAGAAATACCTTAAAGAAGGTGTTGCAGAGTATCAGAAACGTCTGAATCGCTTTTCTAAAATTGAGACAATTGAGCTAGCTGATGAAAAGACACCTGATAAAGCTAGTATATCTGAAAATCAAAGAATTTTAGATATAGAAGGGGAACGTATTTTGAGTAAAATAGGTGAGAGGGATTATGTCATTGGTTTGGCTATAGAAGGGAAACAATTGCCATCTGAATCATTTAGCCATCTAATCGATCAAAAAATGATATCCGGCTACTCTACTATTATTTTTGTTATTGGTGGTAGTTTGGGTTTATCTCAAAAAGTGAAAAAACGTGCTGATTATTTAATGAGTTTTGGACTGTTAACCTTACCTCATCAACTTATGAAATTAGTCTTGATGGAACAAATTTATCGTGCTTTTATGATTCGTCAAGGCACTCCTTACCACAAA

SEQ ID NO: 22390 - protein, 159 aa, Streptococcus agalactiae
MKLKIITVGKLKEKYLKEGVAEYQKRLNRFSKIETIELADEKTPDKASISENQRILDIEGERILSKIGERDYVIGLAIEGKQLPSESFSHLIDQKMISGYSTIIFVIGGSLGLSQKVKKRADYLMSFGLLTLPHQLMKLVLMEQIYRAFMIRQGTPYHK

SEQ ID NO: 22391 - protein, 1227 aa, Streptococcus agalactiae
GTGAAAAAAAAATTAGTCTCATCACTTCTAAAGTGTTCTCTAATCATTATTGTTAGCTTTGCTGGTGGAGCATTTGCTAGTTTTGTCATGAATCATAATGACAATATTCCAAATGGTGGTGTCACTAAAACTAGTAAAGTAAATTATAATAACATAACGCCTACAACAAAAGCTGTTAAAAAGGTACAAAATAGTGTTGTTTCTGTTATCAATTATAAACAACAAGAGAGTCGTTCTGACCTATCAGACTTCTATAGTCATTTTTTTGGTAATCAGGGGGGCAACACTGATAAGGGCTTACAAGTTTACGGTGAAGGCTCTGGAGTCATCTATAAAAAAGATGGTAAAAATGCCTATGTTGTCACTAATAACCACGTCATTGATGGGGCTAAACAAATTGAAATTCAACTAGCTGATGGCTCAAAAGCAGTTGGGAAACTTGTTGGGTCAGATACCTACTCTGATTTAGCCGTCGTCAAAATTCCATCAGATAAGGTTTCAAATATTGCAGAATTTGCTGATTCATCAAAACTCAACATTGGTGAAACTGCTATAGCGATCGGAAGCCCTCTTGGAACTGAGTATGCAAATTCTGTAACTCAAGGTATTGTATCTAGTTTAAAAAGAACTGTAACAATGACTAATGAAGAAGGACAAACAGTTTCTACAAATGCTATCCAGACTGATGCTGCTATCAATCCTGGTAATTCAGGTGGAGCACTTATCAATATTGAAGGACAGGTTATTGGAATTAATTCTAGTAAAATTTCTTCTACATCAAATCAAACCTCAGGACAATCGTCAGGAAATAGCGTTGAAGGTATGGGATTTGCCATTCCTTCAAATGATGTTGTTAAGATTATCAATCAACTTGAGAGTAACGGACAAGTAGAGAGACCTGCTCTAGGTATTTCTATGGCTGGATTAAGTAATTTACCATCCGATGTTATTAGTAAACTGAAAATCCCAAGTAATGTTACTAATGGTATTGTAGTAGCATCTATCCAATCTGGCATGCCAGCTCAAGGCAAACTAAAGAAATACGATGTCATTACTAAAGTTGACGATAAAGAAGTAGCATCTCCAAGTGATTTACAAAGTTTACTCTATGGCCACCAGGTAGGAGATTCCATAACAGTAACCTTTTACCGTGGTGAAAATAAACAAACAATCACTATAAAACTTACTAAAACTAGTAAAGATTTAGCTAAACAACGAGCAAATAAC

SEQ ID NO: 22392 - protein, 409 aa, Streptococcus agalactiae
MKKKLVSSLLKCSLIIIVSFAGGAFASFVMNHNDNIPNGGVTKTSKVNYNNITPTTKAVKKVQNSVVSVINYKQQESRSDLSDFYSHFFGNQGGNTDKGLQVYGEGSGVIYKKDGKNAYVVTNNHVIDGAKQIEIQLADGSKAVGKLVGSDTYSDLAVVKIPSDKVSNIAEFADSSKLNIGETAIAIGSPLGTEYANSVTQGIVSSLKRTVTMTNEEGQTVSTNAIQTDAAINPGNSGGALINIEGQVIGINSSKISSTSNQTSGQSSGNSVEGMGFAIPSNDVVKIINQLESNGQVERPALGISMAGLSNLPSDVISKLKIPSNVTNGIVVASIQSGMPAQGKLKKYDVITKVDDKEVASPSDLQSLLYGHQVGDSITVTFYRGENKQTITIKLTKTSKDLAKQRANN

SEQ ID NO: 22393 - protein, 771 aa, Streptococcus agalactiae
ATGGAATATTTAGAAACGATCAACATCAATCATATTGCTCCAAATCCGTATCAACCTCGCCTAGAATTTAATACAAAAGAACTAGAAGAATTAGCCAACTCTATTAAAATTAATGGGCTTATCCAACCCATTATTGTAAGACCGTCAGCAGTCTTTGGTTACGAACTGGTAGCCGGAGAACGACGGCTAAGAGCCGCAAAGTTAGCTAAATTGGAAAGTATACCTGCAATTATAAAATCCTATAATAATGATGATAGTATGCAATTAGCTATTGTCGAAAATTTACAACGATCTAATTTGTCACCTATTGAAGAGGCTAAAGCCTACTCTCAACTTCTACAAAAGAAAAGTATGACACATGAAGAGTTAGCAAAATATATGGGAAAATCTCGTCCCTATATATCAAATACGATACGACTACTAAATTTACCGCCACTAATTACTTCAGCTATTGAAGAAGGAAAACTTTCCTCTGGTCATGCGCGTGCACTACTCAGTCTACCAGATGCTAGTCAACAGAAAGATTGGTATCAGAGAATCCTCACTGAAGATATTAGTGTAAGACGACTAGAGAAGTTATTAAAACAAGAAAAGAAAACAAATCATAAGTCACTTCAAAATAAAGATGTCTTTCTAAAACATCAAGAAAATGAGTTAGCTCAATTTCTAGGTAGCAAAGTGAAACTTACTATTAATAAAGATGGTGCTGGCAATATAAAGATTGCTTTCGCTAACCAAAAAGAATTAAACAGAATTATCAACACTCTAAAA

SEQ ID NO: 22394 - protein, 257 aa, Streptococcus agalactiae
MEYLETININHIAPNPYQPRLEFNTKELEELANSIKINGLIQPIIVRPSAVFGYELVAGERRLRAAKLAKLESIPAIIKSYNNDDSMQLAIVENLQRSNLSPIEEAKAYSQLLQKKSMTHEELAKYMGKSRPYISNTIRLLNLPPLITSAIEEGKLSSGHARALLSLPDASQQKDWYQRILTEDISVRRLEKLLKQEKKTNHKSLQNKDVFLKHQENELAQFLGSKVKLTINKDGAGNIKIAFANQKELNRIINTLK

SEQ ID NO: 22395 - protein, 1359 aa, Streptococcus agalactiae
ATGACGGAAAACGAACAACTATTTTGGAATAGAGTACTAGAGCTATCTCGTTCTCAAATAGCACCAGCAGCTTATGAATTTTTTGTTCTAGAGGCTAGACTCCTCAAAATTGAACATCAAACTGCAGTTATTACTTTAGATAACATTGAAATGAAAAAGCTATTCTGGGAACAAAATTTGGGGCCTGTTATCCTAACAGCTGGTTTTGAAATTTTCAATGCTGAAATTACAGCTAACTATGTCTCAAACGATTTACATTTACAAGAAACTAGTTTTTCTAACTACCAGCAATCTAGCAATGAAGTAAATACTTTACCAATTAGAAAAATCGACTCTAACCTTAAAGAGAAATATACTTTTGCTAATTTTGTTCAAGGAGATGAAAATAGATGGGCTGTTTCAGCATCAATTGCTGTAGCTGATAGTCCTGGCACGACTTATAATCCTCTATTTATCTGGGGGGGACCTGGTCTAGGAAAGACGCATCTACTAAATGCTATTGGAAATCAAGTTTTAAGAGATAATCCAAACGCGAGGGTTTTATACATCACTGCTGAGAATTTTATTAATGAATTTGTCAGTCATATTCGTTTAGATTCGATGGAAGAATTAAAAGAAAAGTTTCGCAACTTGGACTTACTCCTGATTGATGATATTCAGTCGCTTGCTAAGAAAACCTTAGGGGGGACCCAAGAGGAGTTCTTCAATACTTTCAATGCTTTACATACAAACGATAAACAAATCGTATTGACCAGTGACCGAAATCCAAATCAATTAAATGATCTAGAAGAACGTCTAGTCACGCGCTTTAGTTGGGGACTCCCAGTAAATATCACACCACCTGATTTTGAAACACGAGTTGCTATTTTAACCAATAAAATTCAAGAATATCCTTATGATTTTCCTCAAGATACCATTGAATACTTAGCAGGAGAATTTGATTCCAACGTACGTGAATTAGAAGGAGCCTTGAAAAATATTAGTCTAGTTGCTGACTTTAAGCATGCTAAAACTATTACAGTAGATATAGCTGCAGAAGCTATCAGAGCACGTAAAAATGATGGTCCTATTGTTACTGTCATTCCTATAGAAGAAATTCAAATACAAGTTGGTAAATTCTATGGCGTAACTGTAAAAGAGATAAAAGCAACTAAAAGAACACAAGATATTGTCCTTGCAAGACAGGTAGCCATGTACTTAGCTCGTGAGATGACAGATAACAGTCTCCCAAAAATAGGTAAAGAATTTGGGGGACGAGATCACTCAACTGTTCTCCACGCTTATAATAAAATAAAAAATATGGTTGCTCAAGATGACAACTTACGAATTGAGATAGAAACTATCAAAAATAAAATCAGA

SEQ ID NO: 22396 - protein, 453 aa, Streptococcus agalactiae; identical to SEQ ID NO: 14

SEQ ID NO: 22397 - protein, 1134 aa, Streptococcus agalactiae
ATGATTCATTTTTCAATAAATAAAAATTTCTTCTTGCATGCTCTAACGGTAACTAAACGAGCTATTAGTCATAAAAATGCGATTCCAATCCTTTCAACTGTTAAAATAGAAGTAACTAGAGATGCTATCATTTTAACGGGGTCAAATGGACAAATTTCAATTGAAAATACTATTCCTGCTTCAAATGAAAATGCAGGTTTACTAGTAACGAATCCAGGCTCTATTTTATTAGAAGCTGGTTTCTTTATTAATATTATTTCAAGTTTACCAGATGTAACTTTAGAATTTACAGAAATTGAACAACATCAAATTGTTCTTACTAGTGGAAAATCAGAGATTACTTTGAAAGGTAAGGATGTCGATCAATACCCTCGTCTGCAGGAAATGACAACAGATACTCCATTAACATTAGAAACTAAACTGTTAAAATCAATTATTAATGAAACTGCTTTTGCTGCTAGCCAACAAGAAAGCCGTCCAATCTTAACAGGTGTTCATTTGGTTATCAGTCAAAATAAATACTTTAAGGCTGTTGCGACAGATTCACACCGTATGAGTCAACGCACTTTCCAATTAGAGAAATCGGCTAATAATTTTGATTTGGTTGTTCCAAGTAAATCCCTTCGAGAATTTTCGGCTGTTTTTACAGATGATATTGAAACTGTAGAGGTTTTCTTCTCAGATAGTCAAATGCTATTTAGAAGTGAAAATATCAGCTTCTATACACGTTTGCTTGAAGGAAACTACCCTGATACTGATCGCCTCCTAACTAATCAGTTTGAAACCGAAATTATCTTTAATACAAATGCTTTACGCCATGCTATGGAACGTGCTTATTTAATTTCGAATGCAACTCAGAACGGTACTGTTCGTTTAGAAATTCAAAATGAAACAGTCTCAGCTCATGTAAACTCTCCAGAAGTTGGTAAAGTTAATGAGGAATTGGATACTGTTAGCCTTAAAGGTGATAGTTTAAATATTAGTTTTAATCCAACTTACCTAATTGAATCTTTAAAAGCAGTAAAAAGCGAAACAGTTACGATTCGATTTATTTCTCCAGTACGTCCATTTACTTTGACACCTGGTGAAGATACTGAAGATTTCATACAATTAATAACTCCTGTTCGTACTAAC

SEQ ID NO: 22398 - protein, 378 aa, Streptococcus agalactiae; identical to SEQ ID NO: 16

SEQ ID NO: 22399 - protein, 879 aa, Streptococcus agalactiae
ATGACTCTATATATAATAGCTAACCCCCATGCTGGTAATAAAAATGCCTCCACTATTGTTGGTCAAATTCAGGAGCTTTATCATACTGAAGATATTTCTGTGTTCTATACAGAACAGAAAGATGATGAAAAAAAACAAGTCATTAATATACTAAGGTCTTTTAAAGAAAGTGATCATCTAATGATTATAGGAGGAGATGGTACCTTATCAAAAGTAATGACTTATCTCCCCCAACATATTCCGTGCGCTTATTATCCTGTTGGTTCGGGAAATGATTTTGCTAGAGCTTTGAAAATTCCTAACCTCAAAGAAACCCTTACCGCTATTCAGACAGAAAGATTAAAGGAAATTAATTGCTTTATTTATGATAAAGGGCTGATTTTGAATAGTTTAGATTTAGGTTTTGCAGCCTATGTCGTTTGGAAAGCATCTAACTCTAAAATAAAAAATATTTTGAATAGATATCGTCTAGGAAAAATAACTTACATTGTTATAGCTATCAAATCATTATTACATTCTTCTAAAGTACAAGTATTAGTGGAAGGAGAGACAGGACAGCAGATAAAACTAAATGACCTTTATTTTTTCGCATTAGCAAATAACACTTATTTTGGAGGTGGCATTACTATTTGGCCTAAAGCAAGTGCTTTAACTGCAGAGTTAGATATGGTTTACGCTAAAGGGTATACTTTTCTAAAACGATTAAGTATTTTATTATCTTTGGTTTTTAAAAGGCATACTACCTCTAAAAGTATAAAACACCAGACTTTCAAAGCTATGACCGTATATTTTCCTAAAAATAGTTTGATTGAAATAGATGGCGAAATAGTTGAGTTAGATCAGATTAGTTTAAAATGTCAAAAAAGGTATTTATATATG

SEQ ID NO: 22400 - protein, 293 aa, Streptococcus agalactiae
MTLYIIANPHAGNKNASTIVGQIQELYHTEDISVFYTEQKDDEKKQVINILRSFKESDHLMIIGGDGTLSKVMTYLPQHIPCAYYPVGSGNDFARALKIPNLKETLTAIQTERLKEINCFIYDKGLILNSLDLGFAAYVVWKASNSKIKNILNRYRLGKITYIVIAIKSLLHSSKVQVLVEGETGQQIKLNDLYFFALANNTYFGGGITIWPKASALTAELDMVYAKGYTFLKRLSILLSLVFKRHTTSKSIKHQTFKAMTVYFPKNSLIEIDGEIVELDQISLKCQKRYLYM

SEQ ID NO: 22401 - protein, 195 aa, Streptococcus agalactiae
ATGTATCAAGTTGGATCACTTGTTGAAATGAAAAAACCTCATGCTTGTGTAATTAAAGAAACTGGTAAAAAGGCTAATCAATGGAAGGTACTGAGAGTAGGAGCTGATATTAAAATTCAGTGTACTAACTGTCAGCATGTGATTATGATGAGTCGTTATGATTTTGAGCGAAAATTGAAAAAAGTACTGCAACCA

SEQ ID NO: 22402 - protein, 65 aa, Streptococcus agalactiae; identical to SEQ ID NO: 20

SEQ ID NO: 22403 - protein, 114 aa, Streptococcus agalactiae
TTGGATAATTTAATCAGGTTAGCTGAGATTTTTGACGTGAGCTTAGATGAACATGTTTTAGCTAACACAAATGAAGTTAAAGTTGAACGTATTTATGAAAAAAATCTTGATCTG

SEQ ID NO: 22404 - protein, 38 aa, Streptococcus agalactiae
MDNLIRLAEIFDVSLDEHVLANTNEVKVERIYEKNLDL

SEQ ID NO: 22405 - protein, 1113 aa, Streptococcus agalactiae
ATGGCTTTAACAGCAGGTATTGTAGGCTTACCAAATGTTGGTAAATCAACTTTATTTAACGCAATTACAAAAGCAGGAGCAGAAGCTGCTAATTATCCTTTTGCGACTATTGATCCCAATGTTGGTATGGTAGAGGTACCAGATGAGCGTCTGCAAAAATTGACAGAATTGATTACGCCTAAAAAAACAGTTCCGACAACCTTTGAATTTACTGATATTGCAGGTATTGTTAAAGGTGCTTCGAAGGGGGAAGGTCTAGGAAATAAATTTTTAGCTAATATTCGTGAAGTGGATGCTATTGTTCATGTGGTACGTGCTTTTGATGATGAAAATGTTATGCGTGAACAAGGTCGTGAGGATGCCTTCGTTGATCCTATAGCAGATATTGATACTATTAATCTTGAATTAATCTTAGCTGATTTAGAGTCAATCAATAAACGTTATGCGCGTGTTGAAAAAATGGCACGAACTCAAAAAGATAAAGAATCAGTAGCAGAGTTCAATGTTTTACAAAAGATTAAACCTGTTTTGGAAGATGGGAAATCAGCTCGTACCATTGAGTTTACAGAAGAGGAAGCAAAAGTTGTTAAAGGTCTCTTTTTATTAACAACTAAACCTGTTTTATATGTTGCTAATGTTGATGAGGACAAAGTAGCTGATCCTGATGATATCGACTATGTTAATCAAATTCGTGCATTTGCAGAAACAGAGAGTGCAGAAGTAGTTGTGATTTCTGCTCGAGCTGAAGAAGAAATATCTGAACTTGATGATGAAGATAAGTTAGAATTTTTAGAAGCTATTGGATTAACAGAATCTGGTGTTGATAAATTAACACGAGCTGCCTATCATCTTTTAGGCCTTGGAACTTACTTTACTGCTGGTGAAAAAGAGGTTCGCGCTTGGACGTTTAAGCGTGGTATAAAAGCTCCACAAGCTGCTGGTATTATCCATTCAGATTTTGAAAGAGGTTTTATTCGTGCAGTAACGATGTCATATGATGACCTTATTCAATATGGATCTGAAAAAGCAGTAAAAGAAGCTGGCCGGTTACGTGAAGAAGGAAAAGAGTATATTGTTCAAGATGGCGATATCATGGAATTCCGTTTCAATGTC

SEQ ID NO: 22406 - protein, 371 aa, Streptococcus agalactiae; identical to SEQ ID NO: 9610

SEQ ID NO: 22407 - protein, 573 aa, Streptococcus agalactiae
ATGGTAAAAATGATTGTTGGATTAGGAAATCCAGGAAGTAAATATAATGATACAAAACATAATATTGGATTTATGGCTATTGACAGAATTGTAAAAAACCTTGACGTCAACTTTACAGAAGATAAAAATTTTAAAGCAGAGATAGGTAGTGATTTTATCAACGGTGAAAAAATTTATTTTATCAAACCAACTACTTTTATGAATAACAGTGGTATTGCGGTAAAAGCCCTGCTTACTTACTACAACATTTCTATTAAGGATATGATTATCATATATGATGATTTAGACATGGAAGTCGGTAAAATACGTTTTCGTCAAAAAGGATCTGCTGGGGGACATAATGGTATCAAGTCTATTATTGCTCATTTAGGTACTCAAGAATTTGATCGTATTAAAGTAGGTATAGGACGTCCGAATGGACGTATGACAGTTATTAATCATGTTCTAGGGAAGTTTGATAAAAATGATGAAATTATGATATCAAATACTCTTGATAAGGTTGACAATGCTGTCAAGTATTATTTACAGACGAATGATTTTCAAAAAACAATGCAGAAATACAACGGTTTAAAA

SEQ ID NO: 22408 - protein, 191 aa, Streptococcus agalactiae
MVKMIVGLGNPGSKYNDTKHNIGFMAIDRIVKNLDVNFTEDKNFKAEIGSDFINGEKIYFIKPTTFMNNSGIAVKALLTYYNISIKDMIIIYDDLDMEVGKIRFRQKGSAGGHNGIKSIIAHLGTQEFDRIKVGIGRPNGRMTVINHVLGKFDKNDEIMISNTLDKVDNAVKYYLQTNDFQKTMQKYNGLK

SEQ ID NO: 22409 - protein, 3495 aa, Streptococcus agalactiae
ATGAATATTATAGAATTATTTAGCCAAAATAAAGTGGTGCGGACATGGCACTCTGGATTAGTAACTAATAGTCGCCAATTAGTTATGGGGTTTTCAGGAGCAAGTAAAGCTATTGCTATAGCATCAGCCTACGAGAAGTTATCTAAAAAAATTATGGTAGTCACTGCCACTCAAAACGATTCTGATAAATTATCAAGTGATATATCAAGTTTAATTGGAGAAGATAACGTTTATCAATTTTTTGCTGATGACGTTCCTGCAGCAGAGTTTATTTTCTCTTCATTAGATAAATCAATTTCACGACTCAGTGCCCTGAGGTTTCTAAAAGATCCAGAAAAAAACGGTGTTTTGATTACTAGTATCAGTGGTTTAAGGTTACTATTACCAAATCCGGAAGTTTTCTCGAAAAGTCAATATAAGTTTGAAATCGGTCAAGAATGTTATTTAGATAAATTGAGTAAGAACCTAGTCAATTTAGGTTATCAGAAAGTTTCTCAAGTATTTAGTCCTGGTGAATTTAGCCAAAGAGGAGATATTTTAGATATTTTTGAGATGACACAAGAATATCCTTATCGCTTGGAATTCTTCGGAGATGAAATAGATGGCATCAGGCAGTTTGATATTGACACTCAAAAGTCTCTTAAACAATTAGAGTCAGTACAGATTTCGCCAGCAGATGATATTATTTTACAAGATGCAGATTTCGAGCGTGCAAAGAAAAAACTTGAGGGCTATCTAGTAACAGCTAGTGAGGTACAACGCGCCTATTTGAGCGAGGTTTTATCTGCAACTGAAAATCATTTTAAGCACTCAGATATTCGTCGTTTTCTAAGTATCTTTTATGAAAAAGAATGGGGAATATTAGACTATATTCCTGAGGGAACTCCACTTTTTGTTGATGATTTTCAAAAAATTGTAGATCGAAATGCTAAGTTAGATTTAGAAATAGCTAGCCTTCTGACGGAAGATTTACAACAAGGCAAGTCTCATTCTAGTTTGAACTATTTTTCAGATCCTTATAAGCAATTAAGACAATACCAACCAGCAACCTTCTTTTCAAATTTCCACAAAGGATTAGGAAATCTGAAATTTGATAAACTTCATCATTTTACTCAATATGGAATGCAAGAATTTTTTAATCAATTTCCATTGTTGGTCGATGAAATCAATCGTTATAAGAAAGCTGGAGCGACAGTACTGTTGCAAGTAGATTCTCAAAAAGGTTTAAATCTCCTTCAAGAAAATTTAAAAGAATATGGGTTAGATTTAATCATTTCAGATAAAAACGATATCGCTCCAAAGGAGTCACAACTTATTGTTGGGCATCTTTCAAATGGTTTTTATTTTGCAGATGAGAAAATTGTTCTGATTACTGAACGTGAGATTTATCATAGGCGTGTTAAAAGGAAAATTAGACGCAGTAATATTAGTAATGCAGAACGTCTAAAAGATTATAATGAACTTTCAGTTGGCGATTATGTTGTTCATAATGTTCATGGCGTAGGAAAATTTTTAGGTATTGAAACAATTGAGATACAAGGTATTCATCGTGATTATCTGACTATTCAATATCAAAATGCTGATCGTATCTCTATCCCCGTAGAACAAATTGAACTTCTAACAAAATATGTCTCTGCAGATGGCAAAGAGCCCAAAATTAATACGTTAAATGATGGTCGCTTCAAAAAAGCAAAACAGAGAGTTGCAAAGCAAGTAGAAGATATTGCTGATGATTTGTTGAAACTTTATGCAGAGCGTAGTCAATTACAAGGATTTGCATTTTCTCCTGACGATAATATGCAAAATGACTTTGATAATGATTTTGCATATGTAGAGACAGAGGATCAATTGCGGTCGATAAAAGAAATTAAACAGGATATGGAAGGTAATCGTCCGATGGATCGATTATTGGTTGGAGACGTTGGTTTTGGTAAGACAGAGGTTGCTATGCGTGCGGCTTTCAAAGCTGTCAATGACCATAAACAAGTTGCTGTTTTAGTCCCAACAACAGTTCTAGCTCAGCAGCATTTTGAAAATTTTAAAGAACGTTTTAGTAATTATCCTGTTACAGTTGATGTACTTAGTCGTTTTCGTAGCAAAAAAGAACAAACAGATACACTAAAAAGATTATCTAAGGGCCAAGTTGATATTATTATTGGAACACATCGGCTTCTCTCTCAAGATGTTGTATTTTCGGATTTAGGGTTAATAGTTATTGATGAGGAACAGCGATTTGGTGTAAAGCATAAAGAAAAGTTAAAAGAATTAAAAACAAAAGTTGATGTCTTAACTTTGACAGCGACCCCAATACCTAGAACATTACATATGTCAATGCTTGGCATTAGAGACTTATCAGTCATTGAAACACCTCCAACTAATCGTTATCCTGTGCAGACTTACGTTTTGGAGACAAATCCTGGTTTAGTTAGAGAAGCTATTATTCGTGAGATAGACAGAGGAGGACAGGTTTTTTATGTTTACAATAAAGTTGACACTATTGAACAGAAAGTTTCAGAACTTCAGGAGTTAGTACCAGAAGCTAGTATTGGTTTTGTTCATGGTCAAATGTCTGAAATTCAATTAGAAAATACATTAATAGACTTTATCAATGGAGATTACGATGTTTTAGTTGCAACGACAATAATTGAGACAGGAGTCGATATTTCAAATGTTAATACCCTCTTTGTTGAAAATGCAGATCATATGGGCTTGTCAACCCTTTATCAATTAAGAGGCCGTGTGGGTAGAAGTAATCGCATTGCTTATGCTTACCTTATGTACAGACCTGATAAAGTTTTAACAGAAATTTCTGAGAAAAGACTAGATGCAATCAAAGGGTTTACAGAATTGGGATCTGGTTTTAAAATAGCGATGCGTGATTTATCTATACGTGGTGCAGGAAATATTTTAGGAGCTTCACAAAGTGGTTTTATTGATTCGGTTGGATTCGAGATGTATTCACAGCTTCTAGAGCAAGCGATTGCCACCAAACAAGGGAAATCATTAATTCGTCAAAAAGGTAATGCTGAATTAGCCTTACAAATTGACGCCTATTTACCAGCAGAATATATATCAGATGAGCGCCAAAAAATAGAAATATATAAGCGTATTCGTGAATTAGAAACTAGGGCTGATTATGAAGCCTTACAAGATGAGTTAATAGATCGTTTTGGAGAATATCCTGATCAAGTTGCATACCTTTTAGAAATAGGACTTTTAAAAGCTTATCTGGACCTTGCCTTTACTGAATTAGTAGAAAGAAAAGGTAATGAAATAAGCATCCTATTTGAAAAAGCATCTTTGAAGTATTTTTTAACTCAAGATTATTTTGAAGCACTATCAAAAACTCAACTTAAGGCTAGAATTAGCGAAACAAATGGTAAGATGGAAGTTGTTTTTAATATCAAACATAAGAAAAATTATGAAATTATTGAAGAACTTCTAAAATTTGCCGAATGTTTTATCAAGATTAAGTCACGTAAACCAGTAGAAGAA

SEQ ID NO: 22410 - protein, 1165 aa, Streptococcus agalactiae
MNIIELFSQNKVVRTWHSGLVTNSRQLVMGFSGASKAIAIASAYEKLSKKIMVVTATQNDSDKLSSDISSLIGEDNVYQFFADDVPAAEFIFSSLDKSISRLSALRFLKDPEKNGVLITSISGLRLLLPNPEVFSKSQYKFEIGQECYLDKLSKNLVNLGYQKVSQVFSPGEFSQRGDILDIFEMTQEYPYRLEFFGDEIDGIRQFDIDTQKSLKQLESVQISPADDIILQDADFERAKKKLEGYLVTASEVQRAYLSEVLSATENHFKHSDIRRFLSIFYEKEWGILDYIPEGTPLFVDDFQKIVDRNAKLDLEIASLLTEDLQQGKSHSSLNYFSDPYKQLRQYQPATFFSNFHKGLGNLKFDKLHHFTQYGMQEFFNQFPLLVDEINRYKKAGATVLLQVDSQKGLNLLQENLKEYGLDLIISDKNDIAPKESQLIVGHLSNGFYFADEKIVLITEREIYHRRVKRKIRRSNISNAERLKDYNELSVGDYVVHNVHGVGKFLGIETIEIQGIHRDYLTIQYQNADRISIPVEQIELLTKYVSADGKEPKINTLNDGRFKKAKQRVAKQVEDIADDLLKLYAERSQLQGFAFSPDDNMQNDFDNDFAYVETEDQLRSIKEIKQDMEGNRPMDRLLVGDVGFGKTEVAMRAAFKAVNDHKQVAVLVPTTVLAQQHFENFKERFSNYPVTVDVLSRFRSKKEQTDTLKRLSKGQVDIIIGTHRLLSQDVVFSDLGLIVIDEEQRFGVKHKEKLKELKTKVDVLTLTATPIPRTLHMSMLGIRDLSVIETPPTNRYPVQTYVLETNPGLVREAIIREIDRGGQVFYVYNKVDTIEQKVSELQELVPEASIGFVHGQMSEIQLENTLIDFINGDYDVLVATTIIETGVDISNVNTLFVENADHMGLSTLYQLRGRVGRSNRIAYAYLMYRPDKVLTEISEKRLDAIKGFTELGSGFKIAMRDLSIRGAGNILGASQSGFIDSVGFEMYSQLLEQAIATKQGKSLIRQKGNAELALQIDAYLPAEYISDERQKIEIYKRIRELETRADYEALQDELIDRFGEYPDQVAYLLEIGLLKAYLDLAFTELVERKGNEISILFEKASLKYFLTQDYFEALSKTQLKARISETNGKMEVVFNIKHKKNYEIIEELLKFAECFIKIKSRKPVEE

SEQ ID NO: 22411 - protein, 108 aa, Streptococcus agalactiae
TTGAGAGAATTAAGAGAGCTATTAGCTCTCTTTTTGTTACATTATATTGACAAATATTATCAGTTCAGATATTTTTCAAAAAAAAATGCTAAAATAGTAGAGTTAATT

SEQ ID NO: 22412 - protein, 36 aa, Streptococcus agalactiae
MRELRELLALFLLHYIDKYYQFRYFSKKNAKIVELI

SEQ ID NO: 22413 - protein, 270 aa, Streptococcus agalactiae; identical to SEQ ID NO: 9615

SEQ ID NO: 22414 - protein, 90 aa, Streptococcus agalactiae; identical to SEQ ID NO: 32

SEQ ID NO: 22415 - protein, 369 aa, Streptococcus agalactiae
ATGAGCAAGCCTAATGTTGTTCAGTTAAATAATCAATATATTAACGATGAGAATCTAAAAAAACGTTACGAAGCTGAGGAGTTACGCCGAAAAAATCGTTTAATGGGTTGGGTTCTTATTTTTGTCATGCTTTTATTTATTTTACCCACTTATAATTTAGTTAAGAGTTACAGAACTTTACAAGAACGTCGTCAAGAAGTTGTAAAATTAACGAAAGACTATCAGACATTAACTAATAGAACTGAGAACCAGAAGTTACTAGCAAAACAACTAAAAAATCCAGATTACGTTCAAAAATATGCTCGAGCTAAGTATTATTTCTCTAAGACCGGCGAAATGATTTACCCATTACCAGACCTTTTACCAAAA

SEQ ID NO: 22416 - protein, 123 aa, Streptococcus agalactiae; identical to SEQ ID NO: 34

SEQ ID NO: 22417 - protein, 132 aa, Streptococcus agalactiae; identical to SEQ ID NO: 14093

SEQ ID NO: 22418 - protein, 44 aa, Streptococcus agalactiae; identical to SEQ ID NO: 36

SEQ ID NO: 22419 - protein, 1284 aa, Streptococcus agalactiae
ATGAAGAAAGTTTTAACCTTCTTATTATGTAGCTTATATTTTGTATCAATCCCAGCTATAAGTACCGAGGAGCCATTAACGCTTTCTCAAAATAGACGATACGCCTTAACTCAGACAGTTGTGGATAAGGAAATGTATTTTGATGCTATTCCAGAGAGACCAACTACAAAAATTGAAATAAGCAGTTTTCAAGATGAAGCTTTAACCATAACAGGAGAGACTTTAGTTCCAAATACTTTATTGTCGATTGTTTCCCTTACAATTAATTCAAATGGAATTCCAGTATTTACTTTGTCCAATGGACAGTTCATAAAGGCTAGTCGTGAAGCTATTTTTAATGATTTAGTTTCTAAGCAGCAATCTGTCTCATTGGATTATTGGTTAAAACCTTCTTTTGTGACTTATGAAGCACCTTACACAAATGGTGTTAGTGAAGTTAAAAATAATTTAAAACCTTATTCCAGAGTGCATTTAGTAGAACAAGCAGAAACAGAACATGGTATTTATTATAAAACGGACAGTGGTTTTTGGATATCAGTAGAAGATCTATCGGTTGCTGATAATCGTATAGCTAAGGTTCAAGAAGTATTATTGGAAAAATATAATAAAGATAAATATGGTATATACATCAAACAATTAAATACACAGACAGTAGCTGGTATTAATATTGATAGGTCAATGTACTCTGCAAGTATTGCAAAATTAGCAACACTTTATGCTAGCCAAGAGCAAGTAAAATTAGGAAAACTGTCATTGGACAGCAAATTTGAATACAAAGATAATGTTAATCAATTTCCTAATAGCTATGATCCAAGTGGTAGTGGGAAATTAGAGAAAAAAGCTGATCATAAATTATATACAGTTAAGGAGTTACTTGAAGCAACTGCCAAGGAATCAGATAATGTTGCAACAAATATGCTAGGTTATTATGTCAATAATCAATACGATTCAATGTTTCAAACACAAGTAGACACAATTTCTGGTATGCACTGGGATATGAAGAAACGCCAGATTTCTCCACAAGCTGCGGGTAAAATGATGGAAGCAATTTATTATCAAAATGGAGATATTGTTAATTACCTATCAAAGACTGATTTTGATAATACAAGAATCCCTAAAAATATACCAGTTAAAGTAGCACATAAAATTGGAGATGCTTATGACTACAAACATGATGCGGCTATTGTTTATGCAGAACAACCTTTTATTATGATTATCTTTACGGATAAATCATCTTACGATGATATCACTAAGATTGCTGACGACGTTTACCAGGTTTTAAAA

SEQ ID NO: 22420 - protein, 428 aa, Streptococcus agalactiae
MKKVLTFLLCSLYFVSIPAISTEEPLTLSQNRRYALTQTVVDKEMYFDAIPERPTTKIEISSFQDEALTITGETLVPNTLLSIVSLTINSNGIPVFTLSNGQFIKASREAIFNDLVSKQQSVSLDYWLKPSFVTYEAPYTNGVSEVKNNLKPYSRVHLVEQAETEHGIYYKTDSGFWISVEDLSVADNRIAKVQEVLLEKYNKDKYGIYIKQLNTQTVAGINIDRSMYSASIAKLATLYASQEQVKLGKLSLDSKFEYKDNVNQFPNSYDPSGSGKLEKKADHKLYTVKELLEATAKESDNVATNMLGYYVNNQYDSMFQTQVDTISGMHWDMKKRQISPQAAGKMMEAIYYQNGDIVNYLSKTDFDNTRIPKNIPVKVAHKIGDAYDYKHDAAIVYAEQPFIMIIFTDKSSYDDITKIADDVYQVLK

SEQ ID NO: 22421 - protein, 1272 aa, Streptococcus agalactiae
ATGTATAACACTATTTTGAAAGATACCTTATCCAAAGGGTTATTTACCGCTCATCAGAAAGTTCTAATTGCTGTTTCTGGTGGCATTGATTCAATAAATTTGTTGCAATTTTTATACCAGTATCAAAAAGAGTTATCAATTAGTATTGGTATTGCACACATAAATCATGGACAGCGAAAAGAATCAGAAAAAGAAGAAGAATATATCAGACAGTGGGGACAGATACATGATGTCCCTGTCTTTATCTCTTATTTTCAAGGAATATTTTCAGAAGATAGAGCACGTAACCATCGCTACAATTTTTTTTCAAAAGTTATGCGTGAAGAAGGTTACACGGCTTTAGTAACAGCTCACCATGCTGATGATCAAGCTGAAACTGTATTTATGAGAATTTTAAGAGGAAGCAGGCTACGCTATTTATCAGGGATTAAGCAAGTGAGTGCTTTTGCAAACGGTCAATTGATTAGACCATTTCTTCCATATAAAAAGGAGTTATTACCAAATATTTTTCATTTTGAAGATGCTAGCAATGCTTCGTCTGATTATTTGAGAAATCGAATAAGAAACGTCTACTTTCCTGCTTTGGAAAGAGAAAATAATCAATTGAAAGATTCTCTCATAACTCTCTCTGAGGAAACAGAGTGTTTATTCACGGCTTTAACAGACCTAACAAGGAGCATCGAAGTAACAAACTGCTATGATTTTTTAAGGCAAACTCATTCTGTCCAAGAATTTTTATTGCAAGATTACATTAGCAAATTTCCAGATTTACAAGTGAGTAAAGAACAGTTCAGAGTAATATTAAAATTGATTAGAACTAAAGCCAATATTGACTATACTATTAAATCGGGCTATTTTCTTCATAAAGATTACGAGAGTTTTCATATTACAAAAATCCATCCTAAGACGGATAGTTTTAAGGTTGAAAAAAGATTAGAATTGCATAATATACAAATATTCTCACAATATTTATTTTCCTATGGAAAATTCATTTCTCAAGCAGACATTACTATTCCTATTTATGATACTTCTCCGATTATTTTAAGAAGAAGAAAAGAAGGGGATAGGATATTTTTAGGAAATCACACTAAAAAAATTCGCCGTCTATTTATTGATGAGAAAATAACTCTAAAAGACAGAGAAGAAGCTGTTATTGGGGAGCAAAATAAAGAGTTGATATTTGTGATTGTTGCAGGTAGAACATATTTGAGAAAACCTTCTGAACATGATATAATGAAGGGCAAACTTTATATTGAAAATTTAGAAAAAAGG

SEQ ID NO: 22422 - protein, 424 aa, Streptococcus agalactiae
MYNTILKDTLSKGLFTAHQKVLIAVSGGIDSINLLQFLYQYQKELSISIGIAHINHGQRKESEKEEEYIRQWGQIHDVPVFISYFQGIFSEDRARNHRYNFFSKVMREEGYTALVTAHHADDQAETVFMRILRGSRLRYLSGIKQVSAFANGQLIRPFLPYKKELLPNIFHFEDASNASSDYLRNRIRNVYFPALERENNQLKDSLITLSEETECLFTALTDLTRSIEVTNCYDFLRQTHSVQEFLLQDYISKFPDLQVSKEQFRVILKLIRTKANIDYTIKSGYFLHKDYESFHITKIHPKTDSFKVEKRLELHNIQIFSQYLFSYGKFISQADITIPIYDTSPIILRRRKEGDRIFLGNHTKKIRRLFIDEKITLKDREEAVIGEQNKELIFVIVAGRTYLRKPSEHDIMKGKLYIENLEKR

SEQ ID NO: 22423 - protein, 540 aa, Streptococcus agalactiae
ATGCTTGAAAATGATATAAAAAAAGTTTTATATTCAGAAGAAGATATTATTCTGAAAACGAAAGAATTAGGAGCTAAATTAACTGCAGATTATGCAGGTAAGAATCCATTATTAGTAGGTGTATTAAAGGGGTCAGTGCCTTTTATGGCTGAACTATTAAAGCATATTGATACACATGTTGAAATTGATTTTATGGTTGTTTCAAGCTATCATGGTGGTACAACTAGTAGTGGAGAAGTTAAAATTTTAAAAGATGTCGATACTAACATTGAAGGAAGAGATGTAATCTTTATTGAAGACATCATTGATACTGGACGTACATTAAAATACCTTCGAGATATGTTTAAGTATCGTCAAGCTAACTCTGTCAAAGTTGCAACCCTTTTTGATAAGCCAGAAGGGCGATTGGTAGATATTGATGCTGATTACGTTTGTTACGATATCCCAAATGAATTTATTGTGGGATTTGGTTTAGACTATGCTGAAAACTATCGTAACCTACCTTATGTCGGTGTGTTAAAAGAAGAAATTTACTCAAAA

SEQ ID NO: 22424 - protein, 180 aa, Streptococcus agalactiae; identical to SEQ ID NO: 42

SEQ ID NO: 22425 - protein, 1974 aa, Streptococcus agalactiae
ATGAAAAATAATAAAAATAATGGTTTTCTGAAAAATTCCTTTATTTACATATTATTGATTATTGCGGTTATTACAACCTTTCAATACTATTTAAAAGGAACTAGCTCTCAAAACCAGCAAATTTCTTATACAAAACTTGTTAAACAATTAAAAGCTGGAGAAATTAAGTCTATTTCATACCAGCCAAGTGGTGGTGTTGTTGAAGTTAGTGGGACATATAAGAAAGCCAAAACAATTAAATCAGCTAATAGTTTTACTTTTTTAGGTGGTAGTGTTGCTACTAAAGTTACAGGATTTAATTCTGTTATACTACCAAATGACTCTTCAATAAAATCTCTTGTTAGCGCTGCTGAAGAAAATAACACTAATATTCAGGTCAAACATGAAAGTTCAAGTGGGACATGGATTTCTTATATTGCCAGTTTTTTACCTTTAGTTATCATGATTGGTTTCTTTATGATGATGATGAACCAAGGCGGTGGCGGTGGCGCTCGTGGTGCCATGAGCTTTGGTAAAAATAAAGCAAGATCATCTAGTAAAGATGAGGTTAAAGTTCGATTTTCGGATGTTGCTGGAGCAGAGGAAGAAAAGCAAGAATTAATAGAAGTCGTTGACTTCCTTAAAGATCCTAAACGATATAAATCTCTAGGTGCCCGAATTCCAGCAGGGGTTCTATTAGAAGGACCTCCAGGGACAGGTAAAACTCTGTTAGCAAAAGCTGTTGCCGGTGAAGCAGGGGTTCCATTCTTTAGTATTTCCGGTTCAGATTTTGTTGAAATGTTTGTCGGTGTTGGAGCTAGTCGAGTACGCTCTTTGTTTGAAGACGCTAAAAAAGCTGAACGTGCTATTATTTTCATTGATGAAATTGATGCTGTTGGACGTCGACGTGGAGCTGGTATGGGTGGCGGAAACGATGAACGTGAACAAACGCTCAACCAACTTTTAATTGAAATGGATGGTTTTGAAGGAAACGAAAGTATTATCGTTATCGCTGCTACCAACCGTAGTGACGTGTTAGATCCCGCATTACTGCGTCCAGGACGTTTTGATAGAAAAGTTCTAGTTGGACAACCTGATGTAAAAGGTCGTGAAGCAATTCTGAGAGTACATGCTAAAAATAAACCATTAGCAGATAATGTTGACTTAAAAGTAGTAGCTCAACAAACCCCAGGATTTGTTGGTGCTGATTTGGAGAATGTTCTCAATGAAGCTGCTTTAGTTGCTGCGCGACGAAATAAAAAAGTTATTGATGCTTCAGATATTGATGAAGCAGAAGACCGTGTAATTGCTGGTCCTTCTAAAAAAGATCGTACTATTTCTGAAAGAGAAAGAGCTATGGTTGCTTACCATGAAGCTGGGCACACAATTGTCGGTTTGATTCTTTCAAATGCGCGAGTTGTTCATAAAGTTACTATCGTACCACGTGGTCGTGCAGGTGGATATATGATTGCTTTACCTAAAGAAGATCAAATGCTTCTTTCAAAAGATGATATGAAAGAGCAATTAGCAGGTCTTATGGGAGGACGTGTAGCGGAAGAAATTATTTTCAACGCTCAGACAACAGGTGCCTCAAATGACTTTGAACAAGCCACTGCCATGGCCCGCGCTATGGTAACTGAATATGGTATGAGTGAGAAACTTGGCCCAGTTCAATACGAAGGTAACCATGCAATGATTGCTGGCCAAATGTCACCTGAAAAATCATATTCTGCTCAAACTGCACAACTTATTGATGATGAAGTTCGTCACCTTCTTAATGAAGCACGTAATAAGGCAGCTGATATTATCAACGAAAACCGTGATACTCATAAATTAATTGCAGAAGCCCTCTTAAAATATGAGACTCTTGATGCTGCTCAGATTAAATCGATTTTCGAGACAGGTAAAATGCCTGAGACAGAAAATGATGAAGATAAAGCAAGAGCGTTATCATACGATGAAATCAAAGAAAAAATGCAAGAAGAAGATAAAAAA

SEQ ID NO: 22426 - protein, 658 aa, Streptococcus agalactiae
MKNNKNNGFLKNSFIYILLIIAVITTFQYYLKGTSSQNQQISYTKLVKQLKAGEIKSISYQPSGGVVEVSGTYKKAKTIKSANSFTFLGGSVATKVTGFNSVILPNDSSIKSLVSAAEENNTNIQVKHESSSGTWISYIASFLPLVIMIGFFMMMMNQGGGGGARGAMSFGKNKARSSSKDEVKVRFSDVAGAEEEKQELIEVVDFLKDPKRYKSLGARIPAGVLLEGPPGTGKTLLAKAVAGEAGVPFFSISGSDFVEMFVGVGASRVRSLFEDAKKAERAIIFIDEIDAVGRRRGAGMGGGNDEREQTLNQLLIEMDGFEGNESIIVIAATNRSDVLDPALLRPGRFDRKVLVGQPDVKGREAILRVHAKNKPLADNVDLKVVAQQTPGFVGADLENVLNEAALVAARRNKKVIDASDIDEAEDRVIAGPSKKDRTISERERAMVAYHEAGHTIVGLILSNARVVHKVTIVPRGRAGGYMIALPKEDQMLLSKDDMKEQLAGLMGGRVAEEIIFNAQTTGASNDFEQATAMARAMVTEYGMSEKLGPVQYEGNHAMIAGQMSPEKSYSAQTAQLIDDEVRHLLNEARNKAADIINENRDTHKLIAEALLKYETLDAAQIKSIFETGKMPETENDEDKARALSYDEIKEKMQEEDKK

SEQ ID NO: 22427 - protein, 345 aa, Streptococcus agalactiae
ATGCTTTTCTCTGGAGATGAGGTTAACAAATCTGTTAATGTCTTATCTGGGGGTGAAAAAGTACGCGTTATGCTTTCGAAATTAATGCTATTAAAATCTAATGTTCTTGTTCTTGATGATCCAACAAACCACTTAGATTTGGAATCTATTTCAAGTCTCAACGATGGACTAAAAGATTTCAAAGAATCTATTATTTTTGCAAGTCATGACCACGAGTTTATTCAAACTTTAGCGAACCATATTATTGTTCTTTCTAAAAACGGAGTTATCGATCGTATCGATGAAACTTACGATGAATTTCTTGAAAATACCGAAGTACAAGCTAAGGTCGCTCAACTCTGGAAA

SEQ ID NO: 22428 - protein, 115 aa, Streptococcus agalactiae
MLFSGDEVNKSVNVLSGGEKVRVMLSKLMLLKSNVLVLDDPTNHLDLESISSLNDGLKDFKESIIFASHDHEFIQTLANHIIVLSKNGVIDRIDETYDEFLENTEVQAKVAQLWK

SEQ ID NO: 22429 - protein, 851 aa, Streptococcus agalactiae
ATGACATTCGATGCAGTTGACCAGTTGGCAGTAAACACTGTCCGTACGCTTTCAATGGATGCTATCCAAGCAGCTAATTCAGGCCACCCCGGTTTACCAATGGGGGCAGCTCCAATGGCTTATGTTCTATGGAATAAATACATGAACATTAATCCTAAAACAAGCCGTAACTGGACAAACAGAGACCGTTTTATTCTTTCTGCAGGACATGGATCTGCAATGCTATACAGCTTATTACATTTAGCTGGTTACGACCTTTCAATCGATGATTTGAAAAATTTCCGTCAATGGGGTTCAAAAACGCCAGGACATCCTGAAGTCAATCATACAGATGGTGTAGAAGCAACAACAGGACCGCTAGGACAAGGTATCGCAAACGCTGTAGGTATGGCAATGGCAGAAGCTCACCTTGCTGCAAAATACAACAAACCAGGTTTCAATATCGTTGACCATTATACTTTTGCTTTAAATGGTGATGGTGACTTAATGGAAGGTGTCAGTCAAGAAGTCGCAAGTTTAGCAGGTCACTTAAAACTTGGAAAATTAATCACTTTATATGATTCAAATGACATTTCTCTAGATGGCCCTACATCTATGGCCTTCACTGAGGATGTTAAAGGACGTTTTGAAGCTTATGGATGGCAACATATCCTCGTTAAAGACGGCATGACTTAGATGCTATTGCCAAAGCTATCGAAGAGGCAAAAGCTGAAACTGAAAAACCAACTATTATTGAAGTTAAAACAATTATTGTTTTTGGATCTGAAAAACAAGGAACTTCAGCAGTTCATGGTGCCCCACTTGGAGCAGAAGGCATTTCTTTACTAAAAATGGAACAAAGGACCNNNNNT

SEQ ID NO: 22430 - protein, 284 aa, Streptococcus agalactiae
  VARIANT 223, 283, 284: Xaa = Any Amino Acid
MTFDAVDQLAVNTVRTLSMDAIQAANSGHPGLPMGAAPMAYVLWNKYMNINPKTSRNWTNRDRFILSAGHGSAMLYSLLHLAGYDLSIDDLKNFRQWGSKTPGHPEVNHTDGVEATTGPLGQGIANAVGMAMAEAHLAAKYNKPGFNIVDHYTFALNGDGDLMEGVSQEVASLAGHLKLGKLITLYDSNDISLDGPTSMAFTEDVKGRFEAYGWQHILVKDGXDLDAIAKAIEEAKAETEKPTIIEVKTIIVFGSEKQGTSAVHGAPLGAEGISLLKMEQRTXX

SEQ ID NO: 22431 - protein, 642 aa, Streptococcus agalactiae; identical to SEQ ID NO: 12123

SEQ ID NO: 22432 - protein, 214 aa, Streptococcus agalactiae; identical to SEQ ID NO: 12124

SEQ ID NO: 22433 - protein, 687 aa, Streptococcus agalactiae; identical to SEQ ID NO: 12125

SEQ ID NO: 22434 - protein, 229 aa, Streptococcus agalactiae; identical to SEQ ID NO: 12126

SEQ ID NO: 22435 - protein, 1099 aa, Streptococcus agalactiae
ATGAAAGATATGATTAAAAAGGCTAATTTTAAAGGTCACTTGCTAACAGCAATTTCTTATTTAATTCCAATTGTTTGTGGAGCAGGTTTCTTAGTCGCTATTGGTATGGCTATGGGCGGTAGAGCACAAGATGCACTAGTTATTGGCAATTTTTCTTTTTGGGATACGATGGCCACAATGGGTGGTAAAGCTCTCGGTTTGTTACCTGTTATTATTGCGACTGGTATTGCTTTTTCAATCGCTGGTAAACCAGGGATTGCCCCAGGGTTTGTTGTCGGATTGATTGCAAACGCTATCAGTGCAGGGTTTATTGGTGGTATTTTAGGTGGCTATATTGCAGGATTTATCGCCTTAGGTATTTTAAAAAATGTAAAAGTACCAAATGGGCAAAGGACTGATGCCAACACTTATTGTTCCATTTTTTGCAGCTTTATTGAGTAGTCTTATCATGATTTATCTGATTGGTGGTCCCATTTCAGCCTTTACTGGTTGGTTAACTGATTTTCTAAAAAGCTTAGGAAATACCTCAAATCTTGTTATGGGTGCTGTTATTGGTGTCCTTTCAGGGGTAGACCTTGGAGGACCATTGAATAAAACTGTTTATGCATTTGTATTGACCTTACAAGCTGAAGGAGTAAAAGAACCACTTACTGCTTTACAATTAGTTAATACAGCGACACCAGTAGGATTTGGTTTAGCCTATTTTATTGCTAAATTATTCAAGAAAAACATTTATACTAACGATGAGATTGAAACCTTAAAATCTGCAGTGCCAATGGGGATTGTGAATATTGTTGAAGGGGTAATCCCTATTGTAATGAACAACTTAATGCCTGCAATTTTAGCAATTGGTGTCGGTGGAGCTGTAGGAGGAGCTGTTTCAATGACAATGGGAGCTGATTCTGCAGTGCCATTCGGTGGAATTTTAATGATTCCTACAATGACTAGGCCAATTGCCGGAATTTGTGGCTTGTTATCTAATATCTTGGTAACAGGATTAGTATATTCATTGGCTAAAAAGCCAGTTGATCGTAATGAAGTTACAATTGTTTCTGCTGAAGACGAAGAAGATATCGCACTTGATGATATCGAGATCATG

SEQ ID NO: 22436 - protein, 367 aa, Streptococcus agalactiae; identical to SEQ ID NO: 12128

SEQ ID NO: 22437 - protein, 474 aa, Streptococcus agalactiae
TTGCGTCAAATTAGAAAGGGTTGCCCAATGGAAGCAAGAGATGCTATTAAACGTAAATTAATTAAAACTAATATGAATGTCACCACAAAAGATGAAGCATTTTCAGAATTAGTGTCGCTTTTAAAAAATGAAGGGTTTGTTTCTGATGAAGGAGGATTTATAAAAGACATCTATCTTAGAGAGTCTGAAGGACAAACTGGCATTGGAAATTATATTGCCATTCCGCATGGTAAAAGCTCACATGTAACAGAGCCTGCAGTCGTAATTGGGATTAATTCTTCAGAAATCCCATGGGAAACTTTAGATGATAATGGTGTAAAAGTTATTGTTTTATTTGCAGTAGGAAATGATTCAATCGCTGCACAAGAACATTTAAAAATATTATCACTATTTGCTAGAAAACTAGGAAATGATCAAATTGTAGAAAAATTAATTAATGCTAAAAATGAAGATGATGTTATAGAAGCATTTTCG

SEQ ID NO: 22438 - protein, 158 aa, Streptococcus agalactiae
MRQIRKGCPMEARDAIKRKLIKTNMNVTTKDEAFSELVSLLKNEGFVSDEGGFIKDIYLRESEGQTGIGNYIAIPHGKSSHVTEPAVVIGINSSEIPWETLDDNGVKVIVLFAVGNDSIAAQEHLKILSLFARKLGNDQIVEKLINAKNEDDVIEAFS

SEQ ID NO: 22439 - protein, 309 aa, Streptococcus agalactiae; identical to SEQ ID NO: 12131

SEQ ID NO: 22440 - protein, 103 aa, Streptococcus agalactiae; identical to SEQ ID NO: 12132

SEQ ID NO: 22441 - protein, 1887 aa, Streptococcus agalactiae; identical to SEQ ID NO: 12133

SEQ ID NO: 22442 - protein, 629 aa, Streptococcus agalactiae; identical to SEQ ID NO: 12134

SEQ ID NO: 22443 - protein, 306 aa, Streptococcus agalactiae
ATGCCTCAAAAAAATGCCTTAACGGGAATGGATCAGTTTAGAAATGCATTGTTAAGTGAATTTTCCCAGGCAAAAATTATTGATGTACCAGTAATAGGTCAGGAAACATTTATGATGTGTGAATTGGAACCCCATGTCTTTATAACTGAGAATGTATTTGCTGATGTACACCCAAACTTGATAACTATTCCCTTGGAGAGTGAATTCTCCTTACCTTATGATTTGATTTATAGTAATAATCCAAGTTCATCAACATTAGGATTTATTAAAACAATTGCAGATTCTAAGTTGACATTTTCGATCGAT

SEQ ID NO: 22444 - protein, 102 aa, Streptococcus agalactiae
MPQKNALTGMDQFRNALLSEFSQAKIIDVPVIGQETFMMCELEPHVFITENVFADVHPNLITIPLESEFSLPYDLIYSNNPSSSTLGFIKTIADSKLTFSID

SEQ ID NO: 22445 - protein, 447 aa, Streptococcus agalactiae; identical to SEQ ID NO: 12137

SEQ ID NO: 22446 - protein, 149 aa, Streptococcus agalactiae; identical to SEQ ID NO: 12138

SEQ ID NO: 22447 - protein, 348 aa, Streptococcus agalactiae; identical to SEQ ID NO: 12139

SEQ ID NO: 22448 - protein, 116 aa, Streptococcus agalactiae; identical to SEQ ID NO: 12140

SEQ ID NO: 22449 - protein, 735 aa, Streptococcus agalactiae; identical to SEQ ID NO: 12141

SEQ ID NO: 22450 - protein, 245 aa, Streptococcus agalactiae; identical to SEQ ID NO: 12142

SEQ ID NO: 22451 - protein, 144 aa, Streptococcus agalactiae; identical to SEQ ID NO: 12143

SEQ ID NO: 22452 - protein, 48 aa, Streptococcus agalactiae; identical to SEQ ID NO: 12144

SEQ ID NO: 22453 - protein, 528 aa, Streptococcus agalactiae; identical to SEQ ID NO: 12145

SEQ ID NO: 22454 - protein, 176 aa, Streptococcus agalactiae; identical to SEQ ID NO: 12146

SEQ ID NO: 22455 - protein, 690 aa, Streptococcus agalactiae; identical to SEQ ID NO: 12147

SEQ ID NO: 22456 - protein, 230 aa, Streptococcus agalactiae; identical to SEQ ID NO: 12148

SEQ ID NO: 22457 - protein, 347 aa, Streptococcus agalactiae
ATGAATTCTTACAGTCTGATGGATTTGGTCTGTGGAAAATCATTCATAAAGAAACTTCAGAGGTCGTAGGTGAATGTGGCATTACAATGCAAACTGTTGAAGGAGAAAATTACCCTGAAATAGGTTACCATCTTAAAAAAGAGCATTGGAATAAAGGAATTGCGACAGAAGTTGCTAGGGCAGTACGAGATTATGCTTTCGAAGAGTTAAACCTTGAGGAACTCATTATCATAAGTCGAGATATTAATTTACAGTCAATGAATATTGCCATAAAATCAGGATTTACTATTAAAAAAAGATTTTTGAAGAATGATAGGTTTCCTCATTTTATGTTTTACTTGAAAAGA

SEQ ID NO: 22458 - protein, 116 aa, Streptococcus agalactiae
  VARIANT 5: Xaa = Any Amino Acid
MNSYXSDGFGLWKIIHKETSEVVGECGITMQTVEGENYPEIGYHLKKEHWNKGIATEVARAVRDYAFEELNLEELIIISRDINLQSMNIAIKSGFTIKKRFLKNDRFPHFMFYLKR

SEQ ID NO: 22459 - protein, 117 aa, Streptococcus agalactiae
TTGTCACCAAAAATCACACAATTTGCACAATTGTTAGAAGATATCAATCAACAACTATTAAAAGTAGCAGATGTTGTTGAACAAACAGACTCTGATATTGCTTCTCAGATTAATCAG

SEQ ID NO: 22460 - protein, 39 aa, Streptococcus agalactiae
MSPKITQFAQLLEDINQQLLKVADVVEQTDSDIASQINQ

SEQ ID NO: 22461 - protein, 372 aa, Streptococcus agalactiae
ATGAAGAAAAAGTATTGGACTTTACTAATATTACTATTAACAGTTTTGGGAGGAAGTGGCTATATGGTTTTTAAACAACATACTGAAAAAGAAAAAATGATTGCAATAGCACATAGTGATGAGGCAAAAGAAGTGTATGAAGAACAATTAAAGAAATTAGATAGAAATGCGTTAACTGAAAACGGTAAAATTAAAGAATATCAGATAGATGACTCGAGTTTGAAGTATAATCCAATGGGAGGAATGAATTTAAAACTTATTATCAATGATAATAAAAAATTAGATATAAGTTTTGGATTAGTGAAAAATGAATCAGGAAATTTAGAGACCTTTGGCTATACAATTTCTCCACAACTTGTAGAACTAACGGAG

SEQ ID NO: 22462 - protein, 124 aa, Streptococcus agalactiae
MKKKYWTLLILLLTVLGGSGYMVFKQHTEKEKMIAIAHSDEAKEVYEEQLKKLDRNALTENGKIKEYQIDDSSLKYNPMGGMNLKLIINDNKKLDISFGLVKNESGNLETFGYTISPQLVELTE

SEQ ID NO: 22463 - protein, 123 aa, Streptococcus agalactiae
ATGGAAAGTGAAGATAAAAAGGAAGTTTCTGTTATCTACAGAGGGTCAGAAGGACCAGGTACGAAAGACTCTGCTGTGGATACATTTGATAATGATTTATTATTACATGTAAAAATAAATATG

SEQ ID NO: 22464 - protein, 41 aa, Streptococcus agalactiae
MESEDKKEVSVIYRGSEGPGTKDSAVDTFDNDLLLHVKINM

SEQ ID NO: 22465 - protein, 381 aa, Streptococcus agalactiae
ATGAAGAAAAAATATTGGATTTTACTAATATTACTATTAATAGTTTTGGGAGGAAGTGGCTATATGGTTTTTAAACAACATACAGAAAAAGAAAAAATGATTGCAATAGCTCATAGTGATGAGGCAAAAAAAGTTTATGAATCATTTATGAAAAAAAGAGATAATAGTGCGTTCACAGATGAAGGAATAATAAAAAAATACACAATTGATGATAATAGCGTATACAGTAATCCAATGGGAGGCATTATTGTAAAAGTTATAGTTAATGATTCATCAAAGAATTATATAAGTTATAATTTAATAAAAGATGACGAAGGAAGGATGCATTATGCAAATCTTGTCGTATCAGCTGACCTATCAAACAAACTTGGAGAACCAAAA

SEQ ID NO: 22466 - protein, 127 aa, Streptococcus agalactiae
MKKKYWILLILLLIVLGGSGYMVFKQHTEKEKMIAIAHSDEAKKVYESFMKKRDNSAFTDEGIIKKYTIDDNSVYSNPMGGIIVKVIVNDSSKNYISYNLIKDDEGRMHYANLVVSADLSNKLGEPK

SEQ ID NO: 22467 - protein, 102 aa, Streptococcus agalactiae; identical to SEQ ID NO: 12551

SEQ ID NO: 22468 - protein, 34 aa, Streptococcus agalactiae; identical to SEQ ID NO: 12552

SEQ ID NO: 22469 - protein, 342 aa, Streptococcus agalactiae
ATGAACAAGTCAAAAGTTGTGTTGGCTGTTTGTGTAGCTGGAATAAGTTTTTTAGCAGCAATGAATTCTGATATTGACTCGGTAAGTGCTAATGCAGTTATGAATTCTAATTATATTTCACAAACTTCAAATATAATTATTTCATCTGAAAAAATTTCTCCATACGTTATAGAGTTTGTTACTCAACAGGAATCCAATAATATTACTTCATATGCACGTTCCTTACAATCTCAGGAGGAAGAAAATTTCAGTACTGTCAGGTTTGACTTTACCCAAGCAGAATTTTATGATGAAAATGGGAATTTGGTTGATAAAGATACTGTTATGGAAACAGTAAGACCA

SEQ ID NO: 22470 - protein, 114 aa, Streptococcus agalactiae
MNKSKVVLAVCVAGISFLAAMNSDIDSVSANAVMNSNYISQTSNIIISSEKISPYVIEFVTQQESNNITSYARSLQSQEEENFSTVRFDFTQAEFYDENGNLVDKDTVMETVRP

SEQ ID NO: 22471 - protein, 305 aa, Streptococcus agalactiae
ATGCGTGTTTCAGGTAATACAGGATTAGTCGGTTTACAATCAAGCTACTATGTAGATTTTCAAAAGGTTCAAGGAGGGTATGATAGACTCGATAGGGTGTATGGTGCCACAGTTGATGTAGCAGGAACTTGGACCTTTTTAGCTAATGGTGTATTTAGGGGTAGTGAAGCACCCGGAGCCTCAGCTTATGGTGGTATAAAAGGTCAGTGGTCTGTCTCACCAGGGTTTGGACTTCCTACTGGTACATCTACAAAATATCTATACTTCAGAGTTGGTAACGACACTTTTTGGTTAGATACTAATTT

SEQ ID NO: 22472 - protein, 102 aa, Streptococcus agalactiae
MRVSGNTGLVGLQSSYYVDFQKVQGGYDRLDRVYGATVDVAGTWTFLANGVFRGSEAPGASAYGGIKGQWSVSPGFGLPTGTSTKYLYFRVGNDTFWLDTNF

SEQ ID NO: 22473 - protein, 252 aa, Streptococcus agalactiae
TTGAGAATTTGTTTGCATTGTATTTCTATTAGCTATACAAAGAAAGGTAAGGTGATTTGTATGTCAACAGTTGCAGTAAGAGTTGATGTTCAGTTAAAAGATGATGCAACAAAGCTTTTTCAATCTTTAGGATTAGATATGAGTACTGCTGTGAAAATGTTTCTCATTCAATCTGTTAAAACTCAAAGTATACCTTTTGAGATAAAAAATAATCCTTCAATTCTAGTTGAAGAATTACAAAATAAGGAGTTT

SEQ ID NO: 22474 - protein, 84 aa, Streptococcus agalactiae
MRICLHCISISYTKKGKVICMSTVAVRVDVQLKDDATKLFQSLGLDMSTAVKMFLIQSVKTQSIPFEIKNNPSILVEELQNKEF

SEQ ID NO: 22475 - protein, 237 aa, Streptococcus agalactiae
TTGAATCTTATAGATAAAATAGAGGTTTATTTGAGTATGAAAAAACGTATATGGTATTTGATAATAATCACAGTAATTTTAGGAGGACTAGTTATGAAAAACTTATTTGCAACAATAGAAGCATCATCAAGGAAACAGGAACAAGATAGAATTGTCAATTACATAAAACAACATGTTGAGTTAACAAATGGTAATCAAATAAAAAAATTGAGTTTATCGACTTTCAAAAAAATGAGA

SEQ ID NO: 22476 - protein, 79 aa, Streptococcus agalactiae
MNLIDKIEVYLSMKKRIWYLIIITVILGGLVMKNLFATIEASSRKQEQDRIVNYIKQHVELTNGNQIKKLSLSTFKKMR

SEQ ID NO: 22477 - protein, 397 aa, Streptococcus agalactiae
ATGAAAAAAAAATATTTATACTTTCTTCCAATAGTATTAATTATAGTGGCAGTAGTTGGCATACTTAATCATAAAAAAATGCCAGATGAAGGAAGGTATTATTTGACTGAAAAAAATTATAATAATCATACTATCTCATTAAATAAAACTGAATTTTTTACCATAACCGATGATCAAGTTACCTATACAAAAAATGGGGAGTTAGAAAAAATATCTTATGATAGCAAAAATAATGAATTGCTTTAATAATGGTAAAAAGTTTTGGACTCATTTCGCTTCTGGTGAGCTTCAGTTAACAGATCCTAAGAACACTGATATGACATTAAATTATGCTAGTAAAAATAGTCCTTTATTCAAATCATATGAAAAAGGAACAGCAAAATTTAAAGAGGAAAAT

SEQ ID NO: 22478 - protein, 133 aa, Streptococcus agalactiae
  VARIANT 82: Xaa = Any Amino Acid
MKKKYLYFLPIVLIIVAVVGILNHKKMPDEGRYYLTEKNYNNHTISLNKTEFFTITDDQVTYTKNGELEKISYDSKNNELLXNNGKKFWTHFASGELQLTDPKNTDMTLNYASKNSPLFKSYEKGTAKFKEEN

SEQ ID NO: 22479 - protein, 660 aa, Streptococcus agalactiae
GTGACACCAAAACCAGTACCGGATAAAGATAAATATGATCCAACAGGAGGGGAAACAACAGTACCCCAAGGGACACCAGTTTCAGATAAAGAAATCACAGACTTAGTTAAGATTCCAGATGGCTCAAAAGGGGTTCCGACAGTTGTTGGTGATCGTCCAGATACTAACGTTCCTGGAGATCATAAAGTAACGGTAGAAGTAACGTATCCAGATGGAACAAAGGATACAGTAGAAGTAACGGTTCATGTGACACCAAAACCAGTACCGGATAAAGATAAATATGATCCAACAGGAGGGGAAACAACAGTACCCCAAGGGACACCAGTTTCAGATAAAGAAATCACAGACTTAGTTAAGATTCCAGATGGCTCAAAAGGGGTTCCGACAGTTGTTGGTGATCGTCCAGATACTAACGTTCCTGGAGATCATAAAGTAACGGTAGAAGTAACGTATCCAGATGGAACAAAGGATACAGTAGAAGTAACGGTTCATGTGACACCAAAACCAGTACCGGATAAAGATAAATATGATCCAACAGGAGGGGAAACAACAGTACCCCAAGGGACACCAGTTTCAGATAAAGAAATCACAGACTTAGTTAAGATTCCAGATGGCTCAAAAGGGGTTCCGACAGTTGTTGGTGATCGTCCAGTANNNNNT

SEQ ID NO: 22480 - protein, 220 aa, Streptococcus agalactiae
  VARIANT 219, 220: Xaa = Any Amino Acid
MTPKPVPDKDKYDPTGGETTVPQGTPVSDKEITDLVKIPDGSKGVPTVVGDRPDTNVPGDHKVTVEVTYPDGTKDTVEVTVHVTPKPVPDKDKYDPTGGETTVPQGTPVSDKEITDLVKIPDGSKGVPTVVGDRPDTNVPGDHKVTVEVTYPDGTKDTVEVTVHVTPKPVPDKDKYDPTGGETTVPQGTPVSDKEITDLVKIPDGSKGVPTVVGDRPVXX

SEQ ID NO: 22481 - protein, 711 aa, Streptococcus agalactiae
ATGACTGTTGAATTTAATAAAATCAACGATACAGTTAACAGCCATAGTCAATTGATTGGTAAACAGAACGAGAGTCTGACGGCTACAATACAAAAAGTTGATAATATACAATCAACAGTATCTAATGTTGATGGACGTTTGTCACGAGTTACACAAACTGCCGACGGTATAGTCACAACAGTTAGTCAGCTTGATAATAATATTTTACCTGGCACAAAAAATTTTACAGGATGGCAAATAGAAGGTGCAGTACTAGAAGATGTAACACAATCATCTTATCCATTTGTCTTTAAAAAATGGATAAGCGGCAACAAGGTATCGCCCTTAATCGAATATGATGTTAAAAAAAATCAAGAGTACACATTTACTGCATACATTGCTAGAGAACAAGCAGGTAATCTATATTTCTACTTGTACGATCTTTGGAATCATCATATCACAAGTGCAACCCCTCGCGAAACCATTATAAGAGACGTTAATTCTAGTGTAATACGATTTAGAATAACATTTATTCCAAATAGAGACGGTAAAATCAGACCACGGTTCGCAATGTTGGCCAGTGATCAAGGCTGGTTTATGGTTGGTGGTTTTATGTTATCTAAAGGTACCGCTGATCTACCCTGGTCTGAATCCAAGCAAGATATCAAAGATAATGTTACTGCGATTAATACAATAGTCGCACAAACAGCGAACAGTTGGGCTATTAAAATT

SEQ ID NO: 22482 - protein, 237 aa, Streptococcus agalactiae
MTVEFNKINDTVNSHSQLIGKQNESLTATIQKVDNIQSTVSNVDGRLSRVTQTADGIVTTVSQLDNNILPGTKNFTGWQIEGAVLEDVTQSSYPFVFKKWISGNKVSPLIEYDVKKNQEYTFTAYIAREQAGNLYFYLYDLWNHHITSATPRETIIRDVNSSVIRFRITFIPNRDGKIRPRFAMLASDQGWFMVGGFMLSKGTADLPWSESKQDIKDNVTAINTIVAQTANSWAIKI

SEQ ID NO: 22483 - protein, 126 aa, Streptococcus agalactiae
GTGACACCAAAACCAGTACCGGATAAAGATAAATATGATCCAACAGGAGGGGAAACAACAGTACCCCAAGGGACACCAGTTTCAGATAAAGAAATCACAGACTTAGTTAAGATTCCNNNNNTTAAT

SEQ ID NO: 22484 - protein, 42 aa, Streptococcus agalactiae
  VARIANT 40, 41: Xaa = Any Amino Acid
MTPKPVPDKDKYDPTGGETTVPQGTPVSDKEITDLVKIPXXN

SEQ ID NO: 22485 - protein, 1167 aa, Streptococcus agalactiae
TTGGATACTCTATCCCTTTCAAGAAAAAATGTAAAAGGGTTGAGGAATTATAAACAAAATACAGTTGCTGAATATTTTAATCTACAGTAAAAATTCTCATAGAGCTAAAAGTGATGCAATCATTTGTGGTAATATATTAACAAAATTATTTTTTATTATTGAAAACCAAAAATCAAGAAAAAGTTTTTCTTCTAAAAACAACAAAATTTCTCCAGAGGAACTTGAGGTTTGTGCAGTTATACAAAATATTATTTTTGAAAGAAAAGGTGATACTGATTTAGTGGGATATTATAAAAATAGTAGTGGTTATATTGATGTGTACTATTTATACAAGATTGTAAGGTTTAAATTTACTAAAAAAGGTAAGTATATTATCGTACCTAGAGATTTGAAAGGTTCTGAAAATTTTATTCTAGAGTCTTGTACTTTATCAGAAGGTGGTCATGATTTTGTTAGACTATACTTTAATTCTCCACTTGAAGTGAAAGAAATTTCTAGTTATATTTTTGAAGAATATATAAATACTAAAAGATCTGCAACTGAGTATTTAAATTATAATAAAAACTATGTTGATGAATATAAGGCAAGTCCTCTTATGGAAAATGTACTTTCAAACACTGATGTAAAAAATATTTTAGTTAGTATAAATAATAAAGTTTATAACTCACAAAATAATATTATTGAGAAAGATCTTATTGACAGAAAAGATATAAAAATTAATCCTGTTAATAATCGAATTCCTGTTTCAGAAATACAAAATTTGACTAATTGGCATAAAGGATTTGATTTGGGTTTTCCATTCTGGGAAGAAGGGGAAAAATATAGAAAAGAAGGAAATTTAAAACGATCAATTTTGTTATATGATTTAGCTAGATCTAATGGCTATTGTTCGCCCGCACTTTTTGAGTCATATGCAATGGCTTTTCATAGATTAAAAGACTATGAAAATGAAATTGATATCTTAGAGAAGGAATAGAGCGTGAGGGCAATTTAGGTAGATTAATTACACGTAGAAATAATGCGATGAAAATGTTAATCAAATCAAGAAACGAACAAAAGAAAATAAAAGAAAATGAAAGTGCTGAAAACATCCTTTTTAGTGAAATAGAGATTTTAAAAAGAAAAAAAACTAGAAAAAAAGCACGTCCAGTCTTGAAAATGNNNNNT

SEQ ID NO: 22486 - protein, 390 aa, Streptococcus agalactiae
  VARIANT 30, 323, 389, 390: Xaa = Any Amino Acid
MDTLSLSRKNVKGLRNYKQNTVAEYFNLQXKNSHRAKSDAIICGNILTKLFFIIENQKSRKSFSSKNNKISPEELEVCAVIQNIIFERKGDTDLVGYYKNSSGYIDVYYLYKIVRFKFTKKGKYIIVPRDLKGSENFILESCTLSEGGHDFVRLYFNSPLEVKEISSYIFEEYINTKRSATEYLNYNKNYVDEYKASPLMENVLSNTDVKNILVSINNKVYNSQNNIIEKDLIDRKDIKINPVNNRIPVSEIQNLTNWHKGFDLGFPFWEEGEKYRKEGNLKRSILLYDLARSNGYCSPALFESYAMAFHRLKDYENEIDILXEGIEREGNLGRLITRRNNAMKMLIKSRNEQKKIKENESAENILFSEIEILKRKKTRKKARPVLKMXX

SEQ ID NO: 22487 - protein, 370 aa, Streptococcus agalactiae
ATGAGTTTTTTTGAAAAATTATTTAGCAAGTTTAATAAAAAGACAACTAGTGATATTGTTCAATTCAATAATAATTCTCATATTAATCCATTTGGTTTTGTAGATTCCCAACAAATGGATATTAATGACAATAATATAAACTTTATAAAAAATAGATTTATTGCTTTTGATATAGAAACGACAGGTTTAAACTCACAGCAAGATAGAATTGTTGAAGTAGGTGCAGTTCTTTTTGAAAATGGTAAAGTCGTTGATTCATATGAATCATTAGTAAATGCTAAAGTTAACATTTCAGCAGATGTAACTCGAATTAATAACATTACAAATCGTATGATTAAGAATGCTCCATCTGAAATCGTATATTATGAAT

SEQ ID NO: 22488 - protein, 124 aa, Streptococcus agalactiae
MSFFEKLFSKFNKKTTSDIVQFNNNSHINPFGFVDSQQMDINDNNINFIKNRFIAFDIETTGLNSQQDRIVEVGAVLFENGKVVDSYESLVNAKVNISADVTRINNITNRMIKNAPSENQYIMN

SEQ ID NO: 22489 - protein, 496 aa, Streptococcus agalactiae
ATGGTAAACCAATTAATAATTTTAGGAAATGGATTTGATAGAGCTTCGGATTTAAAGTCAGGATATATGGATTTTTTCAATTTTAGATTTAAAGATTCAGACAGTACTAGTAGTTTTTGGTATTATATTTTGAGATCATGTTATAATAAAAAATGGTCTAGCGATTTATGGAGTGATATTGAGAAATTAATTTCAGTACATCTAAAAAACATTATAACACTATATAATAACGAAACAATTTTAAGTGGCAAAGATATTGAGAGTATATATATCGAAACATTAAGCACTGATTACTCAAGAAATGATTACTCTACCAGTGAGGAGCTAACGCAAAAAGCACTCCATAATTTTTTGTGGAATCATAATGGTATACCTATTGTTCCAGAACTAGATAATTTATTATTATAATTCAAAAAGTTTAAAAATAATCGAAGATGAGTTTTGTTCTTATTTAACTAATCAAATAGAGATCCAGGAACAATCAAAAGATNNNNNT

SEQ ID NO: 22490 - protein, 166 aa, Streptococcus agalactiae
  VARIANT 136, 165, 166: Xaa = Any Amino Acid
MVNQLIILGNGFDRASDLKSGYMDFFNFRFKDSDSTSSFWYYILRSCYNKKWSSDLWSDIEKLISVHLKNIITLYNNETILSGKDIESIYIETLSTDYSRNDYSTSEELTQKALHNFLWNHNGIPIVPELDNLLLXIQKDLKIIEDEFCSYLTNQIEIQEQSKDXX

SEQ ID NO: 22491 - protein, 746 aa, Streptococcus agalactiae
TTTTCAATAAAATAGTTTTAGAACTTGAAATCAGGAAAGCTTGGCTTTATATGGGAGTGCTAGGATCAACTATTATTTTAGGATCAAGTCCTGTATCTGCTATGGATAGTGTTGGAAATCAAAGTCAAGGTAATGTTCTAGAGCGTCGTCAACGTGATGCGGATAACAAGAGCCAAGGTAATGTTCTAGAACGTCGTCAACGCGATGTGGAAAACAAAAGTCAGGGCAATGTTCTAGAACGTCGTCAACGTGATGTTGAGAATAAGAGCCAAGGCAATGTTCTAGAGCGTCGCCAACGTGATGCAGAAAACAAAAGTCAGGGTAATGTTCTAGAGCGTCGTCAACGCGATGCAGATAACAAGAGCCAAGGTAATGTTCTAGAACGTCGTCAACGCGATGTGGAAAACAAAAGTCAGGGCAATGTTCTAGAGCGTCGCCAACGTGATGTTGAGAACAAGAGCCAAGTAGGTCAACTTATAGGGAAAAATCCACTTCTTTCAAAGTCAACTATATCTAGAGAAAATAATCACTCTAGTCAAGGTGACTCTAACAAACAGTCATTCTCTAAAAAAGTATCTCAGGTTACTAATGTAGCTAATAGACCAATGTTAACTAATAATTCTAGAACAATTTCAGTGATAAATAAATTACCTAAAACAGGTGATGATCAAAATGTCATTTTTAAACTTGTAGGTTTTGGTTTAATTTTGTTAACAAGTCGCTGCGGTTTGAGACGCAATGAAAAT

SEQ ID NO: 22492 - protein, 250 aa, Streptococcus agalactiae
  VARIANT 16: Xaa = Any Amino Acid
LFNKIGFRTWKSGKLXLYMGVLGSTIILGSSPVSAMDSVGNQSQGNVLERRQRDADNKSQGNVLERRQRDVENKSQGNVLERRQRDVENKSQGNVLERRQRDAENKSQGNVLERRQRDADNKSQGNVLERRQRDVENKSQGNVLERRQRDVENKSQVGQLIGKNPLLSKSTISRENNHSSQGDSNKQSFSKKVSQVTNVANRPMLTNNSRTISVINKLPKTGDDQNVIFKLVGFGLILLTSRCGLRRNEN

SEQ ID NO: 22493 - protein, 1023 aa, Streptococcus agalactiae
ATGATTCGTCAATTAGAACAATCGAATTTACCAATAGAACAAGTGAAACTTTTATCATCAAGTCGCTCAGCAGGTAAAATTTTACATTTTAAAGATGAGGCTATACGTGTTGAAGAGACAACAAAAGAATCATTTTACGATGTTGATATTGCCTTGTTTTCAGCTGGTGGATCTATTTCAGCAAAGTTCGCTCCTTATGCAGTAAAGTCTGGAGCAGTTGTAGTAGATAACACGTCATATTTTCGTCAGAATCCTGATGTTCCACTAGTTGTTCCTGAAGTAAATGCTCGTGCCATGACTGGTCATAATGGTATCATAGCTTGCCCTAATTGTTCTACTATTCAAATGATGATTGCTTTAGAGCCCATTCGTCAAAAATGGGGGATAGAGCGTGTTATAGTTTCCACCTATCAAGCTGTTTCGGGTTCAGGTGCACGTGCTGTTGAAGAAACTAAGGAACAGTTGAGACAAGTTTTAAATGATAATCTTTCACCTGATCAATTAATTGCAACAGTCTTGCCATGTTCTAGCGATCAAAAACATTATCCTATCGCATTCAATGCATTACCTCAAATTGATATTTTTACTGATAATGATTATACGTACGAAGAAATGAAGATGACTTTGGAGACAAAGAAAATTATGGAAGATGCTACTATTAAGGTTTCAGCTACCTGCGTCCGTATTCCCGTTTTATCGGGTCATTCTGAGTCCATTTATATTGAGACGAAAGAATTAGCTTCAATCTCTGAAATTAAAAAGGCTATTGCAGATTTTCCTGGTGCCGTCCTACAAGACCTTCCATCTCAGCAAATTTACCCTCAAGCGATTAATGCTGTAGGCTATAGGGAGACCTTTGTTGGTCGTATTCGAAAAGACCTTGATCAAGAAAATGGTGTTCATATGTGGGTAGTTTCAGATAATCTATTGAAGGGGGCAGCTTGGAATTCTGTTCAAATCGCAGAAACATTGCATAAGAATGGGCTGGTTAAACCAGCGAAAGAGTTAAAATTTGAATTAATA

SEQ ID NO: 22494 - protein, 341 aa, Streptococcus agalactiae
MIRQLEQSNLPIEQVKLLSSSRSAGKILHFKDEAIRVEETTKESFYDVDIALFSAGGSISAKFAPYAVKSGAVVVDNTSYFRQNPDVPLVVPEVNARAMTGHNGIIACPNCSTIQMMIALEPIRQKWGIERVIVSTYQAVSGSGARAVEETKEQLRQVLNDNLSPDQLIATVLPCSSDQKHYPIAFNALPQIDIFTDNDYTYEEMKMTLETKKIMEDATIKVSATCVRIPVLSGHSESIYIETKELASISEIKKAIADFPGAVLQDLPSQQIYPQAINAVGYRETFVGRIRKDLDQENGVHMWVVSDNLLKGAAWNSVQIAETLHKNGLVKPAKELKFELI

SEQ ID NO: 22495 - protein, 335 aa, Streptococcus agalactiae
ATGCAAATCATCAAACGTGATGGACAGATTGTTGAATTTGATCCTGAAAAAATCTACCAAGCTATCTTGAAAGCTGCTCAAACAGTTTATGTGCTTGATGAGTCACTTCGTAAGACCTTGCTCAAGTGACTAAAAAAGTAATCTTAGATTTAGAGGATGCTCAGGTTGAACGACCAACGATCAATATGATTCAGTCTTTGGTTGAAAATCGTTTATTGGATGCAGGATACATTCATATTGCTGAACACTATATTTCATACCGTTTGCAACGTGATTTAGAGCGAAATGGTTATGATGATCAAATCACTGTTCATTTACACTTTGAAAAAATTAAG

SEQ ID NO: 22496 - protein, 112 aa, Streptococcus agalactiae
MQIIKRDGQIVEFDPEKIYQAILKAAQTVYVLDESLRZDLAQVTKKVILDLEDAQVERPTINMIQSLVENRLLDAGYIHIAEHYISYRLQRDLERNGYDDQITVHLHFEKIK

SEQ ID NO: 22497 - protein, 516 aa, Streptococcus agalactiae
TTGAATTTTAATTATACATTACCTAGAATAGATAAATTACAACGTAATATTCATGGAACCCTGAATGATAAAAATATTATTTTTGGAATAGATTATGATTCTTTAATTGATATACAAAAAGATAAAAATGTTACCCTGCCTGTTGAATTTACCAAATCATACAGGATATTACAGAACGGAAATATATTTCAATATCCAATTCCCTCTGAATTAACTTTTATAAAATTTTATGGTCATGGTCTGGGTGAAGCAGACTATTCTTATTTTCAATCAATTTTTGACTCAATTAATCTTTATTCCAGTGACACTGTACTAATTTTCTATTGGAGTTGTTATAACGAGAATATTAGGGAACAAATTAAATCTCAACAAGTTCATGCAGTACATAAATTAATTGAAAAATATGGAGATACTTTTAATAATAAGAATCATGGCAGAAATTTATTCACAAAACTTCAATTAGAAAATCGTTTAATTATTCAAGAAATACTTTATAATGATATTCTAAATCCATAT

SEQ ID NO: 22498 - protein, 172 aa, Streptococcus agalactiae
MNFNYTLPRIDKLQRNIHGTLNDKNIIFGIDYDSLIDIQKDKNVTLPVEFTKSYRILQNGNIFQYPIPSELTFIKFYGHGLGEADYSYFQSIFDSINLYSSDTVLIFYWSCYNENIREQIKSQQVHAVHKLIEKYGDTFNNKNHGRNLFTKLQLENRLIIQEILYNDILNPY

SEQ ID NO: 22499 - protein, 1178 aa, Streptococcus agalactiae
ATGGCAAATAAAAAATATCGTGGTGTATCACGTGATAAACAAGGAAGAATATATTATCAAACGGAGTTCAAGGCTAATAATATAACTGGTAAACGCCAACGCAAAAAGAGTTATAAAGACCAATTTGGAAATCCTTTTCGTTCCGAAAAGCAAGCATATGATGAACTTTGTAGAGTGAGAGTTGAATTCCAAACGAAAGATAACAATGATGGTTATTATCTAAGTTTTTCTCAATACATGGAAGAAGTGTATCTACCTTATTACAAACAAACGGTTCAAGCGGTCACTTATCGGACTGCTCTAACTCATCACAAAATGTTTGTTGAAATCTTTGGTAGTAAAAGACTTTCTGAAATTGATGTTCGAGAGTGCGAAAAATTCAGGATATATCTGATTGAAAAGTATTCACCAAATTATGCTAAAGGTGTATGGATTCGATTTAAGCATTGTATTGGGTACGCAGAGAGGCTGGGATATATTGATGAATTCCCTTGCAAATCTCTTGATAATCCGAAAGGGAAAAGACCAGATACAAAGTTTTGACTCTAGAAGACTTAAAAAAAGTAGTCGCTACCTTTGACCTACGGGATTATGAAGAAAGGCATAGATTTACTGCCATATGGCTCTATTTCTTTACGGGTCTTCGTGTATCAGAGGGTTTAAGTTTAATTTGGTCTGATATTGATTTCGACAAAAAGCTCTTACATGTTCAAAGTACACTTGAGTATGAAGGAAACGGAGTCTTTACTCGCAAAAATCCAACTAAGACTTCAGCTGGTATAAGGTGGATTGAGTTAGATGATGAAACTCTAAATGTTCTTCTAAGATGGCGTTCAATTCAAGTGGAAAATGGTGATGACAGTTATGTATTGGCTAGATTCGGAAAACCACTCAATAAATGCACATTAAGTAGAATTCTAAAACGCCAAGCTAAAAAAGCAGGAGTAGAAGTAATCACTGGAAAAGGGTTGCGACATTCTCACGACAGTTTTTTGATAAACGTACTAGGAAAAGATGTTCTGTATGTTTCTAAACGTTCTGGACGAGTTGATAAGGCAACTACCTTGAATACCTATTCTCATTTGTATGATAGCAAAAAAGCTAGTGGTGGAAGAGAGATATCCCAAGCATTACATAAGTTTGGAGTATCATCAAACCCCACCAAAACCCCACTAAAC

SEQ ID NO: 22500 - protein, 393 aa, Streptococcus agalactiae
MANKKYRGVSRDKQGRIYYQTEFKANNITGKRQRKKSYKDQFGNPFRSEKQAYDELCRVRVEFQTKDNNDGYYLSFSQYMEEVYLPYYKQTVQAVTYRTALTHHKMFVEIFGSKRLSEIDVRECEKFRIYLIEKYSPNYAKGVWIRFKHCIGYAERLGYIDEFPCKSLDNPKGKRPDTKFWTLEDLKKVVATFDLRDYEERHRFTAIWLYFFTGLRVSEGLSLIWSDIDFDKKLLHVQSTLEYEGNGVFTRKNPTKTSAGIRWIELDDETLNVLLRWRSIQVENGDDSYVLARFGKPLNKCTLSRILKRQAKKAGVEVITGKGLRHSHDSFLINVLGKDVLYVSKRSGRVDKATTLNTYSHLYDSKKASGGREISQALHKFGVSSNPTKTPLN

SEQ ID NO: 22501 - protein, 231 aa, Streptococcus agalactiae; identical to SEQ ID NO: 13027

SEQ ID NO: 22502 - protein, 77 aa, Streptococcus agalactiae; identical to SEQ ID NO: 13028

SEQ ID NO: 22503 - protein, 621 aa, Streptococcus agalactiae
ATGGGGTTACTACGCCCCCCCATTACACCAATAATCAATAATCACGAAAGGAAGTATATGTCAAAAGACAAACGCTCGAATAAATGGGCTTTTCTGCTCTATCAGGAAAGTGTGCCTAAGAACTATTTAGAGGTGCTTGAAGAGTTACATATCCCCTTTGTTTTAAGTCCGTGGCATGATAAAGACGTAAACAAGGAAACAGGGGAATTCAAAAAAGCTCACAAACATGGGGCTCTCTTCTTTGAATCTCTCAAAAGCTATTCACAAGTCTCTGAATTATTGACGAAGCACCTAAATACACCAAGTCATGTTGAAGTTATCATGTCACCTAAAGGAATGTATGACTACTTTATTCATGCGGAGAATCCAGATAAAACACTCTATGATATCAATGACATTGAATCAGGTTGTGGATTTGAGTTAGATAAATTTCTCACCAGCAATAACAATGATAAATTTTTATCTCTGGTAATTGACATTATCGAAGAACAAAATTTCACAGAGTTTAATAATCTGGTTAGATATGCGAGAAGTGAAAATCCTCAACTGCTTGCCTTGATAATGAATAAAACCTATTTCTTTGCAAAATATCTGGATTCGAGAAGATATTCAAGGAGGAAG

SEQ ID NO: 22504 - protein, 207 aa, Streptococcus agalactiae; identical to SEQ ID NO: 13030

SEQ ID NO: 22505 - protein, 135 aa, Streptococcus agalactiae
ATGGTTGTCCTTAACCGTGAAGTTGACTCACCGACAGCTGGGAAGATGCACCCTATCTTCTTGGAAATCATCATCGCACCATCATACTCAGAAGAAGCGTTACCTATTCTCACAAATAAAAAGAAAAACNNNNNT

SEQ ID NO: 22506 - protein, 45 aa, Streptococcus agalactiae
  VARIANT 44, 45: Xaa = Any Amino Acid
MVVLNREVDSPTAGKMHPIFLEIIIAPSYSEEALPILTNKKKNXX

SEQ ID NO: 22507 - protein, 635 aa, Streptococcus agalactiae
GTGAATATCATAAAACAAGTAAAAAGTTCTTTTGGAGAACTTGAAATTGATTTTTATCTGGACAGGAATAGAAATATTTTTGTGACGATTGAACAATTAGCGCAGGGATTTGGATATAAGAGCCGAAATGCTATTGAAAAGATGATAGAGCGCCAACCCTACCTCAAAGAAAAGCGATTTTCAGTTACTGACAAATTGTCAGCTACTGATGGCAAACAATACGAGACCCGACTATTCAATAAGCGAGGAATTTTTGAGATCGGTATGCTGTCCAAAACGGAGAAAGGTAAAATCTTTCGTCAATGGATTTATGACCATATCGAAGAACTAGAAAGAGAAAACGCTAACTTTAAACTGATACGAGAGCTTGAAAAGTCTAATCATAAAGAATTAACACAAGCTATCAAGGATTGGGAACACTTTAATCAATGGAGCTACAAGGCTATTAGCGACCTTTTGCTAAAATCTGTCACAGGACAGACGCTAAACAACTGAAACAGTCACGGGTAGGTTATGAAATTGCATTAGATTGCCTAAGTGCTGATGAGTTGACGCGATATAGAAAACTTGAACAAAAAGTAATTGTCCTATTGGAGCTCAATGCAGAATATAACGATATTAAAAAATTAGTCCTT

SEQ ID NO: 22508 - protein, 212 aa, Streptococcus agalactiae; identical to SEQ ID NO: 17632

SEQ ID NO: 22509 - protein, 162 aa, Streptococcus agalactiae
ATGACTGACAAAAGAGCAGTCGGCAGACCACCAAAGGGCGAGCAACCGAACATATCAAGATAACGGTTAGAATTAGCCAAGGCTGATGAAAAGTACAGCATATGCTGAATCATGGCTTAACAAAGCAGAAGCATCAGAAAAGCCCTTGAAGATTTGTCAGAC

SEQ ID NO: 22510 - protein, 57 aa, Streptococcus agalactiae
  VARIANT 34: Xaa = Any Amino Acid
MTDKRAVGRPPKGEQPNNIKITVRISQGLDEKVXAYADNHGLTKPEAIRKALEDLSD

SEQ ID NO: 22511 - protein, 456 aa, Streptococcus agalactiae
GTGACACCAAAACCAGTACCGGATAAAGATAAATATGATCCAACAGGAGGGGAAACAACAGTACCCCAAGGGACACCAGTTTCAGATAAAGAAATCACAGACTTAGTTAAGATTCCAGATGGCTCAAAAGGGGTTCCGACAGTTGTTGGTGATCGTCCAGATACTAACGTTCCTGGAGATCATAAAGTAACGGTAGAAGTAACGTATCCAGATGGAACAAAGGATACAGTAGAAGTAACGGTTCATGTGACACCAAAACCAGTACCGGATAAAGATAAATATGATCCAACAGGAGGGGAAACAACAGTACCCCAAGGGACACCAGTTTCAGATAAAGAAATCACAGACTTAGTTAAGATTCCAGATGGCTCAAAAGGGGTTCCGACAGTTGTTGGTGATCGTCCAGATACTAACGTTCCTGGAGATAATAAAGTAACGGTAGAAGTNNNNNTTAAT

SEQ ID NO: 22512 - protein, 152 aa, Streptococcus agalactiae
  VARIANT 150, 151: Xaa = Any Amino Acid
MTPKPVPDKDKYDPTGGETTVPQGTPVSDKEITDLVKIPDGSKGVPTVVGDRPDTNVPGDHKVTVEVTYPDGTKDTVEVTVHVTPKPVPDKDKYDPTGGETTVPQGTPVSDKEITDLVKIPDGSKGVPTVVGDRPDTNVPGDNKVTVEVXXN

SEQ ID NO: 22513 - protein, 150 aa, Streptococcus agalactiae
GTGACACCAAAACCAGTACCGGATAAAGATAAATATGATCCAACAGGAGGGGAAACAACAGTACCCAAGGGGACACCAGTTTCAGATAAAGAAATCACAGACTTAGTTAAGATTCCAGATGGCTCAAAAAGGGGTTCCGACAGTTGTTGG

SEQ ID NO: 22514 - protein, 50 aa, Streptococcus agalactiae
MTPKPVPDKDKYDPTGGETTVPKGTPVSDKEITDLVKIPDGSKRGSDSCW

SEQ ID NO: 22515 - protein, 444 aa, Streptococcus agalactiae
ATGACAGGACTCCCAGCTATCAGTATCCCGACTTACTTATCTGAGTCTGGTTTACCCATAGGGACGATGTTAATGGCAGGTGCAAACTATGATATGGTATTAATTAAATTTGCAACTTTCTTTGAAAAATATCATGGTTTTAATGTTAAATGGCAAAGAATAATAGATAAAGAAGTGAAACCATCTACTGGCCTAATACAGCCTACTAACTCCCTCTTTAAAGCTCATTCATCATTAGTAAATTTAGAAGAAAATTCACAAGTTACTCAAGTATCTATCTCTAAAAAATGGATGAAATCGTCTGTTAAAAATAAACCATCCGTAATGGCATATCAAAAAGCACTTCCTAAAACAGGTGATACAGAATCAAGTCTATCTCCAGTTTTAGTAGTACCCCTTTTATTAGCTTGTTTTAGCTTTGTAACAAAAAAGAATCAGAAAAGT

SEQ ID NO: 22516 - protein, 148 aa, Streptococcus agalactiae
MTGLPAISIPTYLSESGLPIGTMLMAGANYDMVLIKFATFFEKYHGFNVKWQRIIDKEVKPSTGLIQPTNSLFKAHSSLVNLEENSQVTQVSISKKWMKSSVKNKPSVMAYQKALPKTGDTESSLSPVLVVPLLLACFSFVTKKNQKS

SEQ ID NO: 22517 - protein, 471 aa, Streptococcus agalactiae
GTGACACCAAAACCAGTACCGGATAAAGATAAATATGATCCAACAGGAGGGGAAACAACAGTACCCCAAGGGACACCAGTTTCAGATAAAGAAATCACAGACTTAGTTAAGATTCCAGATGGCTCAAAAGGGGTTCCGACAGTTGTTGGTGATCGTCCAGATACTAACGTTCCTGGAGATCATAAAGTAACGGTAGAAGTAACGTATCCAGATGGAACAAAGGATACAGTAGAAGTAACGGTTCATGTGACACCAAAACCAGTACCGGATAAAGATAAATATGATCCAACAGGAGGGGAAACAACAGTACCCCAAGGGACACCAGTTTCAGATAAAGAAATCACAGACTTAGTTAAGATTCCAGATGGCTCAAAAGGGGTTCCGACAGTTGTTGGTGATCGTCCAGATACTAACGTTCCTGGAGATCATAAAGTAACGGTAGAAGTAACGTATCCAGNNNNNTTAATTAAT

SEQ ID NO: 22518 - protein, 157 aa, Streptococcus agalactiae
  VARIANT 153, 154: Xaa = Any Amino Acid
MTPKPVPDKDKYDPTGGETTVPQGTPVSDKEITDLVKIPDGSKGVPTVVGDRPDTNVPGDHKVTVEVTYPDGTKDTVEVTVHVTPKPVPDKDKYDPTGGETTVPQGTPVSDKEITDLVKIPDGSKGVPTVVGDRPDTNVPGDHKVTVEVTYPXXLIN

SEQ ID NO: 22519 - protein, 527 aa, Streptococcus agalactiae
GTGAAGATCATAGCTAAAAAAGATCTATTCATTAACGATGAAATTCGCGTTCGTGAAGTTCGTCTGGTTGGTCTCGAAGGTGAACATTAGGTATTAAACCATTGTCTGAAGCTCAAGCAATTGCAGATGATGCTAATGTTGATTTGGTTTTAATTCAGCCACAAGCTACACCACCTGTTGCGAAAATTATGGACTATGGTAAGTTCAAATTTGAGTATCAAAAGAAACAAAAAGAACAACGTAAAAAACAAAGCGTTGTTACTGTTAAGGAAGTTCGTCTTAGCCCAGTTATTGATAAAGGGGATTTTGAAACAAAACTTCGTAACGGTCGTAAGTTCCTTGAAAAAGGTAACAAAGTTAAAGTTTCTATCCGATTTAAAGGACGTATGATTACTCATAAAGAAATTGGAGCAAAGGTATTGGCGGAATTTGCTGAAGCGACACAAGATATCGCTATTATTGAGCAAAGAGCTAAGATGGATGGTCGCCAAATGTTTATGCAGCTTGCACCAATTCCAGACAAGAAA

SEQ ID NO: 22520 - protein, 176 aa, Streptococcus agalactiae; identical to SEQ ID NO: 2588

SEQ ID NO: 22521 - protein, 198 aa, Streptococcus agalactiae
ATGCCAAAACAAAAAACACACCGCGCATCAGCTAAACGCTTTAAACGCACAGGTTCAGGTGGATTGAAACGCTTCCGCGCGTTTACTTCACACCGTTTCCACGGTAAAACTAAAAAACAACGTCGTCATCTTCGTAAAGCTACTATGGTTTCATCAGGAGATTTCAAACGTATTAAAGCAATGCTTACTCGCCTTAAA

SEQ ID NO: 22522 - protein, 66 aa, Streptococcus agalactiae; identical to SEQ ID NO: 2586

SEQ ID NO: 22523 - protein, 357 aa, Streptococcus agalactiae; identical to SEQ ID NO: 11415

SEQ ID NO: 22524 - protein, 119 aa, Streptococcus agalactiae; identical to SEQ ID NO: 2584

SEQ ID NO: 22525 - protein, 258 aa, Streptococcus agalactiae
ATGGTTTATCATTTTCAAAATCCAAGTGATTTTATGTTAAAAAATTATTTAACAAAAGCAAAGACCATCGCAGTTGTAGGACTGTCAGACCGTCAAGAAACTGCAGCTTATCAAGTATCAAAAATAATGCAAGAAGCAGGTTATCAAATTATTCCAGTTAATCCTAAAAATGCAGGACAGAAAATACTTGGGCAAATGACATATGCCTCACTTAAGGATGTCACTGAACATATTGATATTGTTAATATTTTTCGAACG

SEQ ID NO: 22526 - protein, 86 aa, Streptococcus agalactiae
MVYHFQNPSDFMLKNYLTKAKTIAVVGLSDRQETAAYQVSKIMQEAGYQIIPVNPKNAGQKILGQMTYASLKDVTEHIDIVNIFRT

SEQ ID NO: 22527 - protein, 273 aa, Streptococcus agalactiae
TTGGCAGAGCGCACAGCAATCAATTCACCAATCCAAGGAAGTGCAGCTGATATTCTTAAAATTGCAATGATAAATTTAGATAGGGTACTTGATAAAGGTGGTTATAAATCAAAAATGCTGTTGCAAGTTCATGATGAAATTGTACTTGAAGTCCCTAACGAGGAGATAGGAGCAATCAGGGAGTTGGTTACAAAAACAATGGAGTCAGCAATTAGTTTATCGGTACCTTTGATTGCAGATGAGAACGCAGGTGAGACTTGGTATGAAGCGAAG

SEQ ID NO: 22528 - protein, 91 aa, Streptococcus agalactiae
MAERTAINSPIQGSAADILKIAMINLDRVLDKGGYKSKMLLQVHDEIVLEVPNEEIGAIRELVTKTMESAISLSVPLIADENAGETWYEAK

SEQ ID NO: 22529 - protein, 378 aa, Streptococcus agalactiae
GTGTCTTCACTCCCGGCGGATGGCAATGTTGTTGCTGAGCAAGGACAACAGTTGCTTGCAGAACTTCCAACAGATAGATTGACCGACACCCCACTGAACATTTTCCAGTCTTTTCTTGCTGGATTTGATCAACGAGCTCGTGATAGAGATGGAGATAACACCTCCAACTATACCCTCTCACCATCGCCTGGTTTCTCCACGATCTTACCCAGAACGGGCCCTGAGTCAATCCAACCTACGGGTGCTAGGACGTCTGAAAATCTCCCATCACCGCCATTAAGCTTAGGAGATGAGATGTTACGGTACTCCCCATCTTCCGGACAATCCCAAGATTCTCCCTCGACATGGGCTGCATCGCTACGCCCACCNNNNNTTAAT

SEQ ID NO: 22530 - protein, 126 aa, Streptococcus agalactiae
  VARIANT 124, 125: Xaa = Any Amino Acid
MSSLPADGNVVAEQGQQLLAELPTDRLTDTPLNIFQSFLAGFDQRARDRDGDNTSNYTLSPSPGFSTILPRTGPESIQPTGARTSENLPSPPLSLGDEMLRYSPSSGQSQDSPSTWAASLRPPXXN

SEQ ID NO: 22531 - protein, 771 aa, Streptococcus agalactiae
TTGAAGGACACCAACTTCTCCAGCAAACAGATGGGTAATAGGGATACAAAAGCTACCAATACCAACGGACGAATCCAACTGACTTTTGCAGTTGATCCAACGTGATCATCAGCTTCGAAACTATACTCTAAACTCTGTCTGTTCCCACTTCCTAGGAGAGCAGAAGGAAGATGTACATCACACCATGATTACCGAGCTGTACAATGGTACGCTGATTCTCGACGACGTCTGGCTGTTTATTGTTTGAAGGATGCCTATCTCCCTCAGCGGCTAATGGACAAATTGATGTGTCTCGTGAATTATACTGAAATGGCCAGAGTTACTGGTGTTCCTTTTAATTTTCTTCTATCTCGCGGACAGCAAGTCAAATTCATTTCTCAGCTCTTTAGGAAGGCTTTAGAGCAGGACTTGGTGATCCCGAACCTCAAGAACGAGAATGGTGAAGAACAATACAAAGGCGCAACAGTCATCGAGCCGGTCAAGGACTACTACGACGTCCCGATCGCCACGCTTGATTTTGCATCTCTATACCCTAGCATCATTCAGGCACATAACCTCTGTTATACCACCCTTCTTAACAAGACTAGCGTTGAAAAACTCAAGTTGAAGAAAGACGAAGATTATATTGTGACGCCAAATGGTGACATGTTTTGCACGTCCAAGGTCCGAAAAGGGCTTTTGAGTCAAATTCTACAGGAGTTATTATCCGCGAGAAAACGAGCGAAGAAAGAACTCGCCGTGAAACTGACCCATCAAGAAGGCCTTNNNNNT

SEQ ID NO: 22532 - protein, 258 aa, Streptococcus agalactiae
  VARIANT 29, 72, 257, 258: Xaa = Any Amino Acid
MKDTNFSSKQMGNRDTKATNTNGRIQLDXLQLIQRDHQLRNYTLNSVCSHFLGEQKEDVHHTMITELYNGTXDSRRRLAVYCLKDAYLPQRLMDKLMCLVNYTEMARVTGVPFNFLLSRGQQVKFISQLFRKALEQDLVIPNLKNENGEEQYKGATVIEPVKDYYDVPIATLDFASLYPSIIQAHNLCYTTLLNKTSVEKLKLKKDEDYIVTPNGDMFCTSKVRKGLLSQILQELLSARKRAKKELAVKLTHQEGLXX

SEQ ID NO: 22533 - protein, 687 aa, Streptococcus agalactiae
ATGACATTCAAGCCACCACATCAGGCGCACATGGTCTTCAACACCTCAACTCTACAGATAGTCTACTATCAGCAGTACCAGCAACTGATCAAGTTCAAGTCTGATTTCATGCTCTTCCATAATGTATTCAGCTGCATGCTGGATGTCTGTCTAGACCTCATCTGCTCTGCACTGCTGCTGCAGCTGCTGGTGAATCTCTGTCTGAGAGTCTTTCAGAAGAATGTCTTTAGAAGCCTGGCTGACTGTATCACCCAGCAGTCACTTCATTCTGCTAGACTTGAGAATGCATGCAATAGTGAAATCCCACTCACCTGTGCTGGTATCTCACAAATCTTTCAACATTTCCACTTTTGGAAAGACATCCAGTTCATCACAGGCTCCAGAATGAAAGTCAGAAACATTGAGATGCTCTTTGCATGGCTTTGGGGCTGGAACAGCAATGGGAACAGCAACTGGCCATGTAAACACTGGGAGTCAAAGCAGTACCAGGTTCTCTTCCATCAGTTCTTTGATATCATTGTCAGCATGTACAGGACTCAGCAGGCATATGAGTGGCACACAATTGTGAAGCAGATCTTCATCCACAGCCACTGGATCTTGCTCTATCCAAGCACAGCAGTCTTCTGGGCATGTGGAAAGGAAGGGAAACTGCAAAGCTGGGCTAGCACTCATTCAGAACTGGTCAAC

SEQ ID NO: 22534 - protein, 229 aa, Streptococcus agalactiae
MTFKPPHQAHMVFNTSTLQIVYYQQYQQLIKFKSDFMLFHNVFSCMLDVCLDLICSALLLQLLVNLCLRVFQKNVFRSLADCITQQSLHSARLENACNSEIPLTCAGISQIFQHFHFWKDIQFITGSRMKVRNIEMLFAWLWGWNSNGNSNWPCKHWESKQYQVLFHQFFDIIVSMYRTQQAYEWHTIVKQIFIHSHWILLYPSTAVFWACGKEGKLQSWASTHSELVN

SEQ ID NO: 22535 - protein, 339 aa, Streptococcus agalactiae
GTGATGTCTGAGGCCTCAGACTCCAGCCATGTCCAACATGGGTTGGTGGAGCTGGCACTCAGGAGTGAAGATGAAGATGCATACCAGCCAGAGCTTAGTGAGAGTGGTGAAGATAAAGATAATGAGAATGCCAGCAATCTGGATGAACATTCAGCAGATGGCACATCAGTTGCTGATGCCCAGACTTCTGATTCAGAACATGAACATCCACAGAAAGAATTCTGGTGCAAGCAGTTCTATCCACTGTTGTTCCTGTGTGATCTGGGGGTCATAATGCTAGAGCTGCACTGGTGCTCCTCACTTCACCACAGGGCCTGCTCTACTGCCAGTTCTNNNNNT

SEQ ID NO: 22536 - protein, 113 aa, Streptococcus agalactiae
  VARIANT 112, 113: Xaa = Any Amino Acid
MMSEASDSSHVQHGLVELALRSEDEDAYQPELSESGEDKDNENASNLDEHSADGTSVADAQTSDSEHEHPQKEFWCKQFYPLLFLCDLGVIMLELHWCSSLHHRACSTASSXX

SEQ ID NO: 22537 - protein, 276 aa, Streptococcus agalactiae
ATGCTTTTTTGTTTGTCGCAAATACCGCTTAATACCAATGTTTTAGGGGAAAGTACCGTACCGGAAAATGGTGCTAAAGGAAAGTTAGTTGTTAAAAAGACAGATGACCAGAACAAACCACTTTCAAAAGCTACCTTTGTTTTAAAACCTACTTCACACTCAGAAAGCAAAGTAGAAAAAGTAACTACTGAGGTAACAGGTGAAGCTACTTTTGATAAATTCTCCCACACCGTGGGAAAGAATTACACCTTTATCCAGAAGAAAACNNNNNTTAAT

SEQ ID NO: 22538 - protein, 92 aa, Streptococcus agalactiae
  VARIANT 90, 91: Xaa = Any Amino Acid
MLFCLSQIPLNTNVLGESTVPENGAKGKLVVKKTDDQNKPLSKATFVLKPTSHSESKVEKVTTEVTGEATFDKFSHTVGKNYTFIQKKTXXN

SEQ ID NO: 22539 - protein, 336 aa, Streptococcus agalactiae
GTGACACCAAAACCAGTACCGGATAAAGATAAATATGATCCAACAGGAGGGGAAACAACAGTACCCCAAGGGACACCAGTTTCAGATAAAGAAATCACAGACTTAGTTAAGATTCCAGATGGCTCAAAAGGGGTTCCGACAGTTGTTGGTGATCGTCCAGATACTAACGTTCCTGGAGATCATAAAGTAACGGTAGAAGTAACGTATCCAGATGGAACAAAGGATACAGTAGAAGTAACGGTTCATGTGACACCAAAACCAGTACCGGATAAAGATAAATATGATCCAACAGGAGGGGAAACAACAGTACCCCAAGGGACACCAGTNNNNNTTAAT

SEQ ID NO: 22540 - protein, 112 aa, Streptococcus agalactiae
  VARIANT 110, 111: Xaa = Any Amino Acid
MTPKPVPDKDKYDPTGGETTVPQGTPVSDKEITDLVKIPDGSKGVPTVVGDRPDTNVPGDHKVTVEVTYPDGTKDTVEVTVHVTPKPVPDKDKYDPTGGETTVPQGTPVXXN

SEQ ID NO: 22541 - protein, 231 aa, Streptococcus agalactiae
ATGACTGAAAATCGAAAAAAATTAGTTGAAGTCAAAAATGTTTCTTTGACCTTCAATAAAGGAAAAGCTAATGAAGTGAGAGCAATTGATAATGTTAGTTTTGACATTTATGAAGGTGAAGTGTTTGGATTAGTTGGGGAATCTGGATCAGGAAAGACAACCGTTGGACGTTCAATTTTAAAACTTTATGATATTATGATGGAGAAATTACCTTTAATGGANNNNNTTAAT

SEQ ID NO: 22542 - protein, 77 aa, Streptococcus agalactiae
  VARIANT 74, 75, 76: Xaa = Any Amino Acid
MTENRKKLVEVKNVSLTFNKGKANEVRAIDNVSFDIYEGEVFGLVGESGSGKTTVGRSILKLYDIMMEKLPLMXXXN

SEQ ID NO: 22543 - protein, 108 aa, Streptococcus agalactiae
NTGGATGAGGCTCATCTCTTCAAGAATATCGGTCCAATCCCTGGACTCGGGAATGTAGCTGGAATCACCAACACAACTTCTAAAAAGAGCGTGGATATGGAGNNNNNT

SEQ ID NO: 22544 - protein, 36 aa, Streptococcus agalactiae
  VARIANT 1, 35, 36: Xaa = Any Amino Acid
XDEAHLFKNIGPIPGLGNVAGITNTTSKKSVDMEXX

SEQ ID NO: 22545 - protein, 789 aa, Streptococcus agalactiae
ATGCAACCACCAACCAATTCGGTCAAAGAGGAAGCAGATGAAGGTCGCCTTCGAGACCCTCACTGTAGCATCACATTCAGTCCCAGTGGGTTTTCTGTTCAGTCTCCAATTATATTTCGCTTTTCTTCCCCCTCTTATTCCTTTGCTCTTCATTTTAAACAACAATACCCTTTCTTAACGCTACCACAACAGCTTTCCCGTTTCACCTGTCCTGTTATCACACTCACCTCCCCGGAGCTTTCTTCATATTGGTTTCTAAGCGAGCCTATTATCAAAATGTCGGCCTCGCCAGAGCCTCGAACTGATTCCCCACCAGTCGATTCCACTATTGACAACGAAGAAACCGTGGCGAACGACCCGGTCCCCACAGATCCTCTTGCCGCCGCGGATTTATCTGATGATGAATCCGTTCTCTCTGATGTTGATGAAGCGCAGTTTGAAGGTTTTGACCCGGCGAACGTCGCCATCGATGATCGTCCAGCTCTCGCGATCGATGAGGAGAATCTCAAGTTAATCGGTCGCCATAAGCGCAGAAGAACCGAAGAGGAGGACGAGGCGCAGCGCAAGAAGAAAAAGAAGGAATCCAAGCGTGAGAAGAAGAGTCGTAGGAAGCAACGGGATAGCGATGATGGATTCAGCGAAGGCGAAACGGTGGAAGGCAGACGGTCAAGGAAGCGCAAAGAAGGCAGGGAGAGAAGCAGCAAGGTCGTCGATGAAGTGAATGAGGAGGAGTTGGACCCAGCTACACGTATGATCTATTACGGCTACTCGATTTATCGCATTTGTGAC

SEQ ID NO: 22546 - protein, 263 aa, Streptococcus agalactiae
MQPPTNSVKEEADEGRLRDPHCSITFSPSGFSVQSPIIFRFSSPSYSFALHFKQQYPFLTLPQQLSRFTCPVITLTSPELSSYWFLSEPIIKMSASPEPRTDSPPVDSTIDNEETVANDPVPTDPLAAADLSDDESVLSDVDEAQFEGFDPANVAIDDRPALAIDEENLKLIGRHKRRRTEEEDEAQRKKKKKESKREKKSRRKQRDSDDGFSEGETVEGRRSRKRKEGRERSSKVVDEVNEEELDPATRMIYYGYSIYRICD

SEQ ID NO: 22547 - protein, 633 aa, Streptococcus agalactiae
ATGATCGTCAAAGATAAATGGGACCCAATACACCGAGCCTCTCCATTTCGTTCTTACCTGTACAATTATGCGAGTGACGAGACTGCGCCGTTCTTCCAACCAGGTCCAATCGATGATGAGAATAAATGGGAAGACGCTCTGCGGAAGCGTCCTGGGCCCGCGTACGTCCCAGTTCTCGTAAGGGGCTTTTGGGAACTTGGGAAACGTGCCCAGCGACAACGAGACTTTTTGACCATGATACAAACAAGGCTACATGAAATCAACAATGCCCTTACCGAACTACTATCCCGTCATGACCTTACGATTTCAGTCAGGATCGCTGCATGTAGGAGGAAACATCAAGTGTTGAGCCAAAGATGTCTCGCGTTGGCCTCAAAAACACAGTTGCTTAGGAATCGTGGATATGCCATGGATGAAGCGGAAGAAGAGCTGTCAAAGAAACTGCTCCAGCTTGAACGCTCTATGTTTGATCCAACTCTAAATGGGAGATCAGAAGAAATTTGGGCGAGGATGCTTGCAATCAGAGAAAATACAAAACGTCTACAAATGGAGATTGAACGAACAGGCAAGGGAGCGGCACAACAAGAAGATGACACTTTGAGCGATGCGCAGCTGAAGGCGGCCAAAAAAGTA

SEQ ID NO: 22548 - protein, 211 aa, Streptococcus agalactiae
MIVKDKWDPIHRASPFRSYLYNYASDETAPFFQPGPIDDENKWEDALRKRPGPAYVPVLVRGFWELGKRAQRQRDFLTMIQTRLHEINNALTELLSRHDLTISVRIAACRRKHQVLSQRCLALASKTQLLRNRGYAMDEAEEELSKKLLQLERSMFDPTLNGRSEEIWARMLAIRENTKRLQMEIERTGKGAAQQEDDTLSDAQLKAAKKV

SEQ ID NO: 22549 - protein, 618 aa, Streptococcus agalactiae
TTGGATGCCATCGTTGAAAACATTCAAGCTTTAACCAAAGAAATGGGCATCTCAGACTTACCTCAACCGTGGCTACCACCTCTAAGCAATCAGATTGCAGTAACCGATCTCCGTAAGGAAGAATCAGTAGACCTCTGGAGTAAAGCTCCATCTTACAAAGCTGTTCTGGGCTTTATGGATATACCAAGCCAACAAGCACAAGAAGTAGCTTGGCACGATTTTGAAGACGATGGGCATTTGTCAATTTTTGCAGGGCCAAGTATGGGGAAATCCACAGCCCTTCAAACAGTAACAATGGATCTAGCACGTCACAATAGTCCAGAATTTCTAAACCTTTATCTCTTTGATTTTGGTACCAATGGCCTCTTACCATTAAGACGTTTGCCACATGTAGCAGATTTCTTTACCATTGATGATGACGAAAAAATAGCCAAGTTTATTGCCCGTATCAAAGTTGACATGTCTGATCGTAAGACAGCTCTCAGTCGCTACAATGTCGCGACAGCAAAACTGTACCGTCAGGTATCTGGGGAAAACATGCCCTCAATCCTGATTGTTATAGACAGTTATGAAGGGCTACGGGGAGCTCAGACACTGACCTACTNNNNNTTAATTAAT

SEQ ID NO: 22550 - protein, 206 aa, Streptococcus agalactiae
  VARIANT 202, 203: Xaa = Any Amino Acid
MDAIVENIQALTKEMGISDLPQPWLPPLSNQIAVTDLRKEESVDLWSKAPSYKAVLGFMDIPSQQAQEVAWHDFEDDGHLSIFAGPSMGKSTALQTVTMDLARHNSPEFLNLYLFDFGTNGLLPLRRLPHVADFFTIDDDEKIAKFIARIKVDMSDRKTALSRYNVATAKLYRQVSGENMPSILIVIDSYEGLRGAQTLTYXXLIN

SEQ ID NO: 22551 - protein, 708 aa, Streptococcus agalactiae
ATGGTGAGTTATTACTTATTGATGCAGTTTTTAACTTACTTCGAATATGAATTAGCCATCAATACTGTTATTTACCGACAATTTTTGCTTGTTGCTTATTGGATTATATTTACGGGAGCAATAGCCAGTTTAGACCGGAGACTTCGAAATTCTTTACAGGAGAGGTTAGCTGTTCAAAGAGAACTCCAATTGGCTAATATGATAGATTATAGCCACCATATTGAGGGATTGTATAAAGAAGTTAGGAGCTTCCGACATGATTATAGTAACATGTTAACGACCTTGAAACTAGGGATTGATAATGAAGATATATCTATTGTCAAATCAGTTTATCAGTCTATCTTTAAAGAATCTAATACACATTTCCGACATCCTAAGTATAATATAGACCGGTTGGTTAATGTAGATAACCCAGCCTTAAAAAGTCTTTTAGCAGCCAAGCTTTCACAAGCGATAGCCAATCATATTATGGTATCTATAGAAGTACCAGACAGTATTAAACCTCAAGGGATGGAACTGATTGATTTTATTACCATTGTATCTGTTTTATGGGATAACGCTATTGAGGCATCTTTAGAGACAGACGATCCTAAGATAGCCATGTCTTATTTTACATTAAAACATAAACAAATTTTTATCATAGAAAATTCAACTAAGGAAAAGGCAATAGATACGTCGACGATATTCAATTATGAGATNNNNNTTAAT

SEQ ID NO: 22552 - protein, 236 aa, Streptococcus agalactiae
  VARIANT 233, 234, 235: Xaa = Any Amino Acid
MVSYYLLMQFLTYFEYELAINTVIYRQFLLVAYWIIFTGAIASLDRRLRNSLQERLAVQRELQLANMIDYSHHIEGLYKEVRSFRHDYSNMLTTLKLGIDNEDISIVKSVYQSIFKESNTHFRHPKYNIDRLVNVDNPALKSLLAAKLSQAIANHIMVSIEVPDSIKPQGMELIDFITIVSVLWDNAIEASLETDDPKIAMSYFTLKHKQIFIIENSTKEKAIDTSTIFNYEXXXN

SEQ ID NO: 22553 - protein, 459 aa, Streptococcus agalactiae
TTGTTATATGATTTAGCTAGATCTAATGGCTATTGTTCGCCCGCACTTTTTGAGTCATATGCAATGGCTTTTCATAGATTAAAAGACTATGAAAATGAAATTGATATCTTAGATGAAGGAATAGAGCGTGAGGGCAATTTAGGTAGATTAATTACACGTAGAAATAATGCGATGAAAATGTTAATCAAATCAAGAAACGAACAAAAGAAAATAAAAGAAAATGAAAGTGCTGAAAACATCCTTTTTAGTGAAATAGAGATTTTAAAAAGAAAAAAAACTAGAAAAAATGCACGTCCAGTCTTGAAAATGGACGATGAAATGAATATATTAGAACATTTTGAGTCTATTTCAGATGCAGTAAAAAAAACAGGAATTAATTCAAAAAGTATACGTGATGCTTCAAAAGGTATTCAAAAGCATGCAGGTGGTTTTGTCTGGAGATACGAGGACGAATATAAG

SEQ ID NO: 22554 - protein, 153 aa, Streptococcus agalactiae
MLYDLARSNGYCSPALFESYAMAFHRLKDYENEIDILDEGIEREGNLGRLITRRNNAMKMLIKSRNEQKKIKENESAENILFSEIEILKRKKTRKNARPVLKMDDEMNILEHFESISDAVKKTGINSKSIRDASKGIQKHAGGFVWRYEDEYK

SEQ ID NO: 22555 - protein, 105 aa, Streptococcus agalactiae
GTGTCCGATGTCGTTGTTGATGATAAAGTCGTTGACAAGGACTTGACAGTTCCAGAAGCACGCACAACATGTGCAGAGACACTTGAAGCAGATACGCTTAAGGTC

SEQ ID NO: 22556 - protein, 35 aa, Streptococcus agalactiae
MSDVVVDDKVVDKDLTVPEARTTCAETLEADTLKV

SEQ ID NO: 22557 - protein, 702 aa, Streptococcus agalactiae
ATGAAAGTGCGCGAAATCGAGGGATTGTTGAAGGAGGAAATCGAGCCCAAATTGGAGAAGCTTAGAGGCGAGAAGAGAGCTTTCCTTGATTTTCAGCAGACTCAAAGCGACCTCGAGCGACTGACAAGGCTTGTTGTTGCGCATGATTATTTGAGAAATGGTGAGCGGTTACGAGTAGCGGGTGAAGAGCTGGAAAACAAGCGACGTAAGATTGAAGAACTGGAATCCAACACTGCTCGACTGAAGAGTGAAATCGCAAACCTCGAGGAAGACGTGAGCAAAGTTAAGGCAGCCCGAGACAAAGAACTCCGGAAAGGAGGTAAATTTCAAGCATTGGAGGACGAAGTGAAAAACCACTCCCATGAGATGGTCAGATTATCTACCCAGGCCGATCTGAAGAAATCCAGCATGGCTGAAGAGTCAAAGAAACGAGAGGATGCCCAGAAAGCAGTGCAAGAAGTGCAAACTTTGCTAAAAGAGAAGAAGAAGATATATGACAAGTTACAGGCGCAGTATGACGCAGCCAAGGCAGAGCTTGATGCGCAAACTGCGGAGGTTGAACAGAAAGAGGAACTTCTCCAAACTCTACAGACCGGGGTGGCATCGAAGGAAGGCCAGGAAAATGGATACCAAGGTCAACTACAGGACGCACGCAACCGTGTCAGTGCCGCCGCCACAGAACAAGAACNNNNNTTAATTAAT

SEQ ID NO: 22558 - protein, 234 aa, Streptococcus agalactiae
  VARIANT 230, 231: Xaa = Any Amino Acid
MKVREIEGLLKEEIEPKLEKLRGEKRAFLDFQQTQSDLERLTRLVVAHDYLRNGERLRVAGEELENKRRKIEELESNTARLKSEIANLEEDVSKVKAARDKELRKGGKFQALEDEVKNHSHEMVRLSTQADLKKSSMAEESKKREDAQKAVQEVQTLLKEKKKIYDKLQAQYDAAKAELDAQTAEVEQKEELLQTLQTGVASKEGQENGYQGQLQDARNRVSAAATEQEXXLIN

SEQ ID NO: 22559 - protein, 558 aa, Streptococcus agalactiae
TTGCCTCAGGGCTTTGCTCGCCTCTCTGCAATCTACGGTGGCACTTACATGCTCAATACTGATATCGATGAAGTTCTCTACGAAGATGGCAAGGTCTCGGGCATTAAGGCAACCATGAAAGAAAAGGGCGAACCTGGTCCAGGGATGAGTTTCTCAACCAAGACAAAGAAAATCATTGCTGATCCGTCTTACTTCCCCGGAAAGGTTCGAGTGACTGGATACCTTCTCAAAGCCATCTGTATCTTGAATCACCCCATCGACAAGACCGACGGAAGTGATTCGCTCCAGCTTATTATCCCACAGTCCCAAATTGGACGGAAACATGGTGGGTTGATGAGAATGATTTCCCGGATACCTCTGGCAAAGTGTGCTAATCAAGATATAGATGTCTACATTGCCATGGTCTCCTCTGCTCATAATGTGTGTCCAAAGGGCTATTACGTCGCCATCGTTTCCACGATCGCTGAAAATGAGGCCAACCACCATCTTGAACTGGAAGCTGGGATCCAGCGTCTTGGTAAAATCGAAGAGACATTCATGGGCCNNNNNTTAATTAAT

SEQ ID NO: 22560 - protein, 186 aa, Streptococcus agalactiae
  VARIANT 182, 183: Xaa = Any Amino Acid
MPQGFARLSAIYGGTYMLNTDIDEVLYEDGKVSGIKATMKEKGEPGPGMSFSTKTKKIIADPSYFPGKVRVTGYLLKAICILNHPIDKTDGSDSLQLIIPQSQIGRKHGGLMRMISRIPLAKCANQDIDVYIAMVSSAHNVCPKGYYVAIVSTIAENEANHHLELEAGIQRLGKIEETFMGXXLIN

SEQ ID NO: 22561 - protein, 525 aa, Streptococcus agalactiae
ATGCAGCACATTTCACGTCGACTAAATGGAGCACCAGTACCGGAACAGGACCTACCAGCACCCCCTCAGCCCTCGTCTCCAACCGCGCTCATTAAGAATCCATGGGAAGTTGTTCAGCAATCCGCTCTGGACGACAGACTAGATAAGAAAGATGGCAAAATACCACGAGGACGGGATTTGAAGATGTGCCGCCACGGCCCAAAGGGAATGTGCGATTATTGCATGCCACTGGAGCCATATGCCCCCGAATATCTGGCAGACAAGAAGATTAAACATCTCTCCTTCCATTCTTATTTACGAAAAGTCAACTCGTCAAAAAATAAACCAGAGCTAGGGAGCTCCTTTATGCCCCCATTGACAGAACCTTACTATAGGGTGCGGAAAGATTGCCCATCCGGGCATCCAGCGTGGCCTGAAGGGATATGCACGAAATGTCAACCCAGCGCCATCACACTACAGCCGCAGGAATTTCGAATGGTGGATCACGTCGAGTTTGCCCTCGCGGATCTCATTAANNNNNTTAAT

SEQ ID NO: 22562 - protein, 175 aa, Streptococcus agalactiae
  VARIANT 172, 173, 174: Xaa = Any Amino Acid
MQHISRRLNGAPVPEQDLPAPPQPSSPTALIKNPWEVVQQSALDDRLDKKDGKIPRGRDLKMCRHGPKGMCDYCMPLEPYAPEYLADKKIKHLSFHSYLRKVNSSKNKPELGSSFMPPLTEPYYRVRKDCPSGHPAWPEGICTKCQPSAITLQPQEFRMVDHVEFALADLIXXXN

SEQ ID NO: 22563 - protein, 303 aa, Streptococcus agalactiae; identical to SEQ ID NO: 18881

SEQ ID NO: 22564 - protein, 101 aa, Streptococcus agalactiae; identical to SEQ ID NO: 18882

SEQ ID NO: 22565 - protein, 546 aa, Streptococcus agalactiae
GTGCTTTCTTTAATTCTTTGCTTGATTTTTTTGGAAAAAATTAAAAAGGATATCAAACTTACGGAGCAAAACTCAAGTCTTTGTATAGAAGTTCCACTTTGTTATGATGAAGAATTTGGGCTGGATTTAGAATTTGTGTGCAAACACAATCAAATTTCAAAAGAAGAGCTTATATCTCTTCACACTAAACCTTATTATCTTGTTTTTATGCTAGGTTTTATGGCAGGTTTTCCTTATCTTGGAGGTTTAGATGAAAGACTTTTTACCCCACGCCTTTCAAGCCCTAGAGCAAAAATAGAAGCTGGAAGCGTAGGCATAGCCGATAAACAAACAGGAGTTTATCCTATATCAAGCCCAGGGGGTTGGCAAATCATTGCTAGAACACCTTTGGAATTTTTTGATAAAGAAGATGAAAAAAATCCCACTCTTTTAAAAGCGGGTATGTTTTTAAAATTTAAAGCCATTTCAAAAGATGAATTTTTCGATATCCAAGAGCAAGTTGCTAAAAAAGTCTATCAAAAGGAAATTTATGAGTATAAAAATCAT

SEQ ID NO: 22566 - protein, 182 aa, Streptococcus agalactiae
MLSLILCLIFLEKIKKDIKLTEQNSSLCIEVPLCYDEEFGLDLEFVCKHNQISKEELISLHTKPYYLVFMLGFMAGFPYLGGLDERLFTPRLSSPRAKIEAGSVGIADKQTGVYPISSPGGWQIIARTPLEFFDKEDEKNPTLLKAGMFLKFKAISKDEFFDIQEQVAKKVYQKEIYEYKNH

SEQ ID NO: 22567 - protein, 378 aa, Streptococcus agalactiae
ATGCCAGCTTGGTGGATGGGCGAGCCTTGGATAGTTAAAAAATATATCGATGAAGTGTTTGGTTTGGGTGCTGGAGTGCTTTTTAAAAATGATGGAAGAACTCATGAAAATCCTAGTAAAAACTACGGAAAAGGTGGTTTAGATCATGGTAAAAAATACATGTTTTCTCTCACTTGGAATGCACCTCTTGAAGCCTTTAATGATAAAAATGAATTTTTTGAAGGAAAGGGTGTAGATATGGTGTATTGGCATTTGCATAAGGCTCATGAATTTATAGGTATGAAAGCTTTACCAACTTTTATGTGTAATGATGTGGTAAAAAATCCTCAAGTGGAAAAATATCTAAACGAGTATGAACTACACTTGAAAAAAATTTTT

SEQ ID NO: 22568 - protein, 126 aa, Streptococcus agalactiae
MPAWWMGEPWIVKKYIDEVFGLGAGVLFKNDGRTHENPSKNYGKGGLDHGKKYMFSLTWNAPLEAFNDKNEFFEGKGVDMVYWHLHKAHEFIGMKALPTFMCNDVVKNPQVEKYLNEYELHLKKIF

SEQ ID NO: 22569 - protein, 129 aa, Streptococcus agalactiae
ATGGCAGATAACTTCTTGGAGAAACATTACGAAGAATACGAACAACGCAAAGCAGCGTGGCTGCGAAAAAAGAAACACCTAAAGGCAAAAAAGGTGCGCAACATTCGCAAACCCGACGACGAAGCGTTA

SEQ ID NO: 22570 - protein, 43 aa, Streptococcus agalactiae
MADNFLEKHYEEYEQRKAAWLRKKKHLKAKKVRNIRKPDDEAL

SEQ ID NO: 22571 - protein, 633 aa, Streptococcus agalactiae
GTGCGAGACAACCACGTGAAAATGCTGCATGCGCCAATGGAAGACTTCTGGCAGAGGGTTGGAGTTCTAAATTGTGCGTATTACACGTTCTTTACGCCTTTTAGCGGACAGCATCCAGCACTTGGGGCTGTTGAATTGTCGTTATCGCCACAGCGCAAGCAAAGGGATGTGCGCTTAACCCTTTACAATGGAGTGTACCAACCCATTGCCACAATGATATGCACAGGAGAAGCTGATGATCCTTCTTGCAACATTCCGTCGCAGCATGACGCTTTAGCGTGGCCGAAGCCGCATAGCTGTCTTGATGGAGATGCGTTTGGTGCGTCGCTAATTGGAAATGTGTCAAAGCTTTCCGATGGCTGCTTCATGCAGGAAGCACTCTTTACAAACAGTAGTGAGTCTGAGGAGGACGTGGTGCCGCCGTGGCGGGTGGACAGGTGTGTAGCAGATTTCTGCCGTTCTCTAGCAGTGGCAGGATTCCTCGCACCGCATGTTCCTAGTGGAAAACAATGTCACTTTACCATCGCTGCTCAACAGACCTTGGCACATGATGATGTCATGAGTGGGGAATCGGTTGTTGTTGTGACTGCCGCCCCCCGTGTATACGCCAAGTATCGAATGCCCCCGNNNNNT

SEQ ID NO: 22572 - protein, 211 aa, Streptococcus agalactiae
  VARIANT 210, 211: Xaa = Any Amino Acid
MRDNHVKMLHAPMEDFWQRVGVLNCAYYTFFTPFSGQHPALGAVELSLSPQRKQRDVRLTLYNGVYQPIATMICTGEADDPSCNIPSQHDALAWPKPHSCLDGDAFGASLIGNVSKLSDGCFMQEALFTNSSESEEDVVPPWRVDRCVADFCRSLAVAGFLAPHVPSGKQCHFTIAAQQTLAHDDVMSGESVVVVTAAPRVYAKYRMPPXX

SEQ ID NO: 22573 - protein, 162 aa, Streptococcus agalactiae
TTGCTAGATATTAAAGAAAGTTCTTTTGCGAATTTAAATGAGATCAAAAAAAATGATTTTATTGTTATGCTTTATGGAATTAGCGATGTAGGAAATATAGGGGCTATCACGCGTACAGCTTATGCTTTAGGGGGTGGGGCTTTAATTTTTATTGGTGAAAAA

SEQ ID NO: 22574 - protein, 54 aa, Streptococcus agalactiae
MLDIKESSFANLNEIKKNDFIVMLYGISDVGNIGAITRTAYALGGGALIFIGEK

SEQ ID NO: 22575 - protein, 333 aa, Streptococcus agalactiae
ATGGTAAAAAAAATTATTATTCTTACTTTTTGGGTTAATATATCTTTTGCAATCTCAAGTCTTGAATTAGCAAAAAATTTAGTAAACAATCCTAGTAAAAATTCTCAACTAGAATTATTATTCTCAAATAATTCTTACATAGATAATAATGGAAATTGTGATATTGCAAAAATATCTCAAATATTAAAAACCAATTCTTTAATTGCCTTAACACTATCAAATCCTCAAAGTCTAAAACTAAATTTTAAAGCAAAAGCTGATGAAGTTATGTTTTTTAAAATTTTATCCGATGTTTTAACAGATGCTGGATATATATATTTTATCCCTACAGAT

SEQ ID NO: 22576 - protein, 111 aa, Streptococcus agalactiae
MVKKIIILTFWVNISFAISSLELAKNLVNNPSKNSQLELLFSNNSYIDNNGNCDIAKISQILKTNSLIALTLSNPQSLKLNFKAKADEVMFFKILSDVLTDAGYIYFIPTD

SEQ ID NO: 22577 - protein, 129 aa, Streptococcus agalactiae
ATGTTTGATCAAGAAAATAAAGAACAAAAATTTCCTGTAGGAATTTCAAAACGTTTCTTGATTAAAGATGGAAAAATTACAAGTATTTCAGCTGCTGAATTTGTAAAATTAAATAAAGGTAAAGAATGG

SEQ ID NO: 22578 - protein, 43 aa, Streptococcus agalactiae
MFDQENKEQKFPVGISKRFLIKDGKITSISAAEFVKLNKGKEW

SEQ ID NO: 22579 - protein, 171 aa, Streptococcus agalactiae
TTGGGAATGGTGGAATATTGGTCAAGTATGGGTGGAAAAATTTTAGCTGGCCACCCAAGAAGAAATAAAGAAATTTTTGAAAAACCACGAAATTTTAGTTCGTCAGAATTCCAAGTAAATCAACTTATGCTGTTGAAGCTGTTTATACTGATAGTGATGTTATTAACGACT

SEQ ID NO: 22580 - protein, 57 aa, Streptococcus agalactiae
MGMVEYWSSMGGKILAGHPRRNKEIFEKPRNFSSSEFQVNQLMLLKLFILIVMLLTT

SEQ ID NO: 22581 - protein, 345 aa, Streptococcus agalactiae
ATGGTCATCACAGATATTCAGGTTAATCCTTTTTATCTTTTGGGTATTTTGAACTCTCGCTTAATCTCTCTTTGGTTTTTCATGAAGTTTGATAAATTCCAACGTCGCCTATTCCCACAGTTCAAAGTTAATGAACTAGGAGATTTTCCAATTCCAGATGCTACTGATTCCCAGCAAGAAGACATAGCACAAGTTGTTGAGCAACTGATGGAGGAGATGAAAAAAGATTCTCCTGACACTGAAAAAGTCAATCAGCTTAATCTGGAAATTGATGAACTTGTCATGGACTTGTTTGACTTGGCTGAAGAAGAAAACAAACAGTTAGAGATTTTGAAGTATAGAAAG

SEQ ID NO: 22582 - protein, 115 aa, Streptococcus agalactiae
MVITDIQVNPFYLLGILNSRLISLWFFMKFDKFQRRLFPQFKVNELGDFPIPDATDSQQEDIAQVVEQLMEEMKKDSPDTEKVNQLNLEIDELVMDLFDLAEEENKQLEILKYRK

SEQ ID NO: 22583 - protein, 390 aa, Streptococcus agalactiae
TTGCTTGAGTTTTTTGATAAGGTTTATACCAAAACTTCTGGTATGGGTTTTGAAGCTTTGATGCAAGAATGTGAGTGTATTTGTTATGGTATGCCTTTTTATGCAGGTTGGGGTCTAACAAAAGATAAATTAGAGTGTAAAAGAAGGATGCAAAAAAGAAGTTTAGAAGAAGTTTTCTATGCTGCTTATATACTTTATGCTGAGTATTTTAATCCTTATTTAAATCAAAAAAGTAATATTTTTGATACTATTCAAACTTTAGCAAAATATAAAGATATAGAAAAGGCAAATTCTAATAGACTTTTTTTCTTTGGATTTTCAAAATGGAAAAAGAAATTTGTAAAACCTTTTTTTATAGCTAAAAACAATGAAATCATATTTCTANNNNNT

SEQ ID NO: 22584 - protein, 130 aa, Streptococcus agalactiae
  VARIANT 129, 130: Xaa = Any Amino Acid
MLEFFDKVYTKTSGMGFEALMQECECICYGMPFYAGWGLTKDKLECKRRMQKRSLEEVFYAAYILYAEYFNPYLNQKSNIFDTIQTLAKYKDIEKANSNRLFFFGFSKWKKKFVKPFFIAKNNEIIFLXX

SEQ ID NO: 22585 - protein, 672 aa, Streptococcus agalactiae
ATGGATTTTGAAGAAGGATATTTAAGGCCTTATTGTATTACTTTGGAAAAAGATGGGGTGAATGCAAATTCTTCTTTACCGCGTGATAAAAATTTTTATCTTTCTCAAAATATTTTTACCAAAGAAAGCATAAAAGAAATTCCAGGTGGATTTAAATTTATGGCTTTTGATGCTTTTTTGTATTGGTTGTTTGCTTTTATTTTGGCTCCATTTTTTAACAACAAACTTCATCATCGCACTTTATATCCTTTTGAATTTTTATTTTGGTTTAGATCATTGTATAGAAAGTATCTTTATAAGATTACAGAAAAAAAACTAAATGAAAAGATTTATAATTTAGAAAAAAAGTACTTTTTGGCGATTTTACAAGTTTATAGCGATACGCAAATTAAATATCATTACAAAAAAAGCATAGAGCACTTTATAGATGAAACCATACTTTCTTTTGCAAACCATGCAAGAGCTAAATCTTATCTAGTTTTTAAACACCATCCCATGGATAGGGGCTATAAGAATTATTCTAAACTCATAAATGATTTAAGTCAAAAATATCATGTAGAAGGAAGGGTTTTATATGTTCATGATACCCACTTGCCAGTTCTTTTAAGAAAGGCTTTGGGTTGTATTACTATAAATTCAACAGTAGGCCTTAGTGCTANNNNNTTAATTAAT

SEQ ID NO: 22586 - protein, 224 aa, Streptococcus agalactiae
  VARIANT 220, 221: Xaa = Any Amino Acid
MDFEEGYLRPYCITLEKDGVNANSSLPRDKNFYLSQNIFTKESIKEIPGGFKFMAFDAFLYWLFAFILAPFFNNKLHHRTLYPFEFLFWFRSLYRKYLYKITEKKLNEKIYNLEKKYFLAILQVYSDTQIKYHYKKSIEHFIDETILSFANHARAKSYLVFKHHPMDRGYKNYSKLINDLSQKYHVEGRVLYVHDTHLPVLLRKALGCITINSTVGLSAXXLIN

SEQ ID NO: 22587 - protein, 516 aa, Streptococcus agalactiae
TTGAGTAAAGAAAAAGAAGTATTGCTCAATGAAGAAATAAGAGCGGATGAAATCAGATGTGTTGGCGATGATGGCAAAGTTTATGGTATTATCAGTAGTGATGAAGCTTTAGAAATTGCAAATCGTTTAGGACTTGATCTTGTAATGATAGCTGCAGATGCTAAGCCACCTGTTTGCAAGATCATGGACTATGGTAAATTCCGTTATCAACAAGAGAAAAAACAAAAAGAAGCAAAGAAAAAACAAAAAGTGATTGATATAAAAGAAATCAAACTTTCTGTAAAAATTGCTCAAAATGATATTAATTACAAGGTAAAACATGCTTTAGAATTTTTAGAACAAGGTAAGCATGTGAGATTTCGTGTGTTCTTAAAAGGACGTGAAATGGCAACTCCTGAAGCAGGTGTAGCTTTGCTTGAAAAAATTTGGACTATGATAGAAAATGAAGCTAATCGTGACAAAGAGCCAAATTTTGAAGGTCGTTATGTAAATATGCTTGTAACTCCTAAAAAGGCT

SEQ ID NO: 22588 - protein, 172 aa, Streptococcus agalactiae
MSKEKEVLLNEEIRADEIRCVGDDGKVYGIISSDEALEIANRLGLDLVMIAADAKPPVCKIMDYGKFRYQQEKKQKEAKKKQKVIDIKEIKLSVKIAQNDINYKVKHALEFLEQGKHVRFRVFLKGREMATPEAGVALLEKIWTMIENEANRDKEPNFEGRYVNMLVTPKKA

SEQ ID NO: 22589 - protein, 438 aa, Streptococcus agalactiae
ATGAAGAAAAAATTTATTTCATTAGTTATAGTTAGTTCACTTTTAAACGGATGCCTATTATCACCAACTTTAGTGTATGCAAATGATATAGGTAAAACTACTACTATAACTAGAAATAATACATCAGATGGCTATACTATAATTACACAAAATGATAAACAGATAATATCATATCAATCTGTTGACTCTTCAAGTAAAAATGAAGATGGTTTTACTGCATCTATAGATGCTAGATTTATCGATGATAAATATTCATCTGAAATGACAACTTTAATAAACTTAACTGGATTTATGTCTTCAAAAAAAGAAGATGTTATAAAAAAATACAATTTGCATGATGTTACTAATTCTACTGCAATTAATTTTCCGGTTAGATACTCGATTTCTATTTTAAATGAAAGTATTAATGAAAATGTAAAAATAGTTGATAGTATTCCT

SEQ ID NO: 22590 - protein, 146 aa, Streptococcus agalactiae
MKKKFISLVIVSSLLNGCLLSPTLVYANDIGKTTTITRNNTSDGYTIITQNDKQIISYQSVDSSSKNEDGFTASIDARFIDDKYSSEMTTLINLTGFMSSKKEDVIKKYNLHDVTNSTAINFPVRYSISILNESINENVKIVDSIP

SEQ ID NO: 22591 - protein, 198 aa, Streptococcus agalactiae
TTGATGTATGGTGAAGAGCGACCTCTCTCGATTTTCCAAGCCAAGTGTATAAAGTTATTTAGTCATTTGCCTTTCTTAGGTATTGTTGTACAAAAGGTCTTTCCAACTAAGGTTGTGATAGTGGCAGAAGCAATCGTTACTACGCTTAGGAAAAAACCAACCCAAAAAATCCTTTCTATTGAAGAATTAAATAATAAA

SEQ ID NO: 22592 - protein, 66 aa, Streptococcus agalactiae
MMYGEERPLSIFQAKCIKLFSHLPFLGIVVQKVFPTKVVIVAEAIVTTLRKKPTQKILSIEELNNK

SEQ ID NO: 22593 - protein, 303 aa, Streptococcus agalactiae
ATGGAAGGTTATTATAATGCAACTTTGATAGATTTCTTACAAAATGAACGCATTCGAGACGCAGAATTAATTAAATCAGGTTTATTTGTAGAACGTGTCATTGCACGCATAACGCCAGATATTTTAAATGAAACCCTAAGAGGATATTACTTGGAACGCAGAACAATCTCTGAATTTGAAAGGGACGGTTTAATTAGTTCTAAAGAGTCTCAAATTTTAAGGGATAATGTCAATGAATTAGAAAGCTATTCATTAAGAGATAGTCAATCTTCTATACCTTATCAATTATTGGGATTAAAAAAA

SEQ ID NO: 22594 - protein, 101 aa, Streptococcus agalactiae
MEGYYNATLIDFLQNERIRDAELIKSGLFVERVIARITPDILNETLRGYYLERRTISEFERDGLISSKESQILRDNVNELESYSLRDSQSSIPYQLLGLKK

SEQ ID NO: 22595 - protein, 180 aa, Streptococcus agalactiae; identical to SEQ ID NO: 18357

SEQ ID NO: 22596 - protein, 60 aa, Streptococcus agalactiae; identical to SEQ ID NO: 436

SEQ ID NO: 22597 - protein, 126 aa, Streptococcus agalactiae
GTGCCAGCAGACGTAACAGTAGTTGGTGTTCCAGCTAAAGTTGTCCGTGTCCATGGTCAAAAGGATGATCTTCAAATCCGAAGTATTGAACATGATCGAGAAGAAAGTTATTATTCGTCCAAACTT

SEQ ID NO: 22598 - protein, 42 aa, Streptococcus agalactiae
MPADVTVVGVPAKVVRVHGQKDDLQIRSIEHDREESYYSSKL

SEQ ID NO: 22599 - protein, 216 aa, Streptococcus agalactiae
GTGCAGGAATTCAAGCTAAGTATGCAAGTTTTTTCACAATTATATCAAATGTATATGAGCATAGGCGATGCAAATTCTGCTTATGGGATTATAAATGCTAGTAAAGAACTTACTAAAGAATTATTACCAATTTTAGGTGTAAAGAATGTAAATAGTTTATTTGCTTTTGAAAATAATGAAGATATTAATCCACAAATGCAAGGAGAAGCTAATGCT

SEQ ID NO: 22600 - protein, 72 aa, Streptococcus agalactiae
MQEFKLSMQVFSQLYQMYMSIGDANSAYGIINASKELTKELLPILGVKNVNSLFAFENNEDINPQMQGEANA

SEQ ID NO: 22601 - protein, 201 aa, Streptococcus agalactiae
ATGCTTAATATTGAAATTAAAAGTGATATATCTAAAACTAAAGGAGGAAAGAAATTAATAGATTTTATCAAAGCAAAATATAGTGAATGTTTTTATATAGCAAAAAATAACGATGAGAAAGAGTTAAGGTTAAAAGCTTTAGATACTATGGCTTTTTTAGACATAATAATCAATAAAATAAAGGATGAAGAAGATGGAAAA

SEQ ID NO: 22602 - protein, 67 aa, Streptococcus agalactiae
MLNIEIKSDISKTKGGKKLIDFIKAKYSECFYIAKNNDEKELRLKALDTMAFLDIIINKIKDEEDGK

SEQ ID NO: 22603 - protein, 141 aa, Streptococcus agalactiae
ATGGAAAATGATGCTTTAAAAGATTTAATAAATGTCATAACAGATGATGATAAAGGACAAGTTGCTAATAATGGCGATGAACCTACGCAAGTAGAAGAATATGAACCTATGCAGGTTGCTAATGAGANNNNNTTAATTAAT

SEQ ID NO: 22604 - protein, 47 aa, Streptococcus agalactiae
  VARIANT 43, 44: Xaa = Any Amino Acid
MENDALKDLINVITDDDKGQVANNGDEPTQVEEYEPMQVANEXXLIN

SEQ ID NO: 22605 - protein, 414 aa, Streptococcus agalactiae
ATGGCATTTTATAACCCACAAAGAGTAGTATTTAATCCTGATACAGGCGTTATACAAAACGCAGGAAAAGTCGGTGGTGTCTTATATGACATCATGAGCAAAAGTTTTGATGATAAAGTTAAAGCTAATGAGTTTCAGCAAGAGCAAGATTTAAGAAAGCAACAAATGGAATTTAATGAGGCTATGCAAAACAATCAAATCTTGCAAAATGAGAGAAACTTTGATTATCAAAAAGAAAGAGCAAATATAGCAGATCAGCAATGGCAAATGAATTATAACCAAAGAGCTAGACAATATGCCATGCAAAATGCTTTAAGACAGCAAGCGATAAATGCTAATAAGGCTTACAAGGATTTAAATTATCAAAAAGGATTATTAGAACTTCAAAAATTACAAAATGAGATAAATNNNNNT

SEQ ID NO: 22606 - protein, 138 aa, Streptococcus agalactiae
  VARIANT 137, 138: Xaa = Any Amino Acid
MAFYNPQRVVFNPDTGVIQNAGKVGGVLYDIMSKSFDDKVKANEFQQEQDLRKQQMEFNEAMQNNQILQNERNFDYQKERANIADQQWQMNYNQRARQYAMQNALRQQAINANKAYKDLNYQKGLLELQKLQNEINXX

SEQ ID NO: 22607 - protein, 213 aa, Streptococcus agalactiae
GTGACAAAGTCTGAAGCTAAGGTACTATCTCATAACTATCAGATAGAAAAGAAAGATAATGAGTATGCACTGACTCTCAAAGGCTCTAAAATGGATAACAAAGCAGATTTACTAGCTGGTTTTTACCAAGATTTAGTTTCTTTAAAGATTAGCCCATCAGCTATTGAAGTCATTGACAATAGTTTAGAGGAGCTTTATTTGGAGGTTACCAAA

SEQ ID NO: 22608 - protein, 71 aa, Streptococcus agalactiae
MTKSEAKVLSHNYQIEKKDNEYALTLKGSKMDNKADLLAGFYQDLVSLKISPSAIEVIDNSLEELYLEVTK

SEQ ID NO: 22609 - protein, 201 aa, Streptococcus agalactiae
ATGTTAAAAAAAGAATGGATGGAGAATGTTAGGACATACAAAGTTATATCTATTCTGATTACTTGTTCAATATTTGGTATATTAGGTCCCTTAACTGCACTTATGATGCCTGATATTATGGCAGGAATTTTACCTAAAAAACTACAGGGAGCGATACCAGAGCCTACCTATATTGATTCTTATATTCAGTATTTTAAAATA

SEQ ID NO: 22610 - protein, 67 aa, Streptococcus agalactiae
MLKKEWMENVRTYKVISILITCSIFGILGPLTALMMPDIMAGILPKKLQGAIPEPTYIDSYIQYFKI

SEQ ID NO: 22611 - protein, 351 aa, Streptococcus agalactiae
ATGATATTGATACCAGAAACTACTTTGTTAAATTTAAGCATATGGGGAAGTCATATTGTTATTGATAGTATAAAGAAATTGAGTTACCCTTGGGTAGAGGAAGGGCATTTCCAAAAAGCAGCTTTTATTATAGACCAACTAGCCCACTATACTTGCATTATCGTTTTTTACCATGCGCTTCCTACATATTTACCGCCTAATCATTGGCTTTTGCCTATCAAGCACTTTATTGTCATAGCTCTGGTTTTTATCATTATCACCAAACCCATTAATATTGTGTTTAAAATTTTCTTTAATAAATTTCAAGCTAAAGAATTATCATCATTATTAACACCAAAGAAAAAACAAAAA

SEQ ID NO: 22612 - protein, 117 aa, Streptococcus agalactiae
MILIPETTLLNLSIWGSHIVIDSIKKLSYPWVEEGHFQKAAFIIDQLAHYTCIIVFYHALPTYLPPNHWLLPIKHFIVIALVFIIITKPINIVFKIFFNKFQAKELSSLLTPKKKQK

SEQ ID NO: 22613 - protein, 636 aa, Streptococcus agalactiae
ATGTCAATGCAAGCTTTGCTTGATAATGATGACGAGGTTCTAGTTCCAATGCCAGATTACCCGTTATGGACAGCTTGTGTTAGCCTTGCTGGTGGAAATGCTGTGCATTATATTTGTGATGAGGAAGCTAATTGGTATCCTGATATTGATGATATCAAATCAAAAATCACATCCAAAACAAAAGCAATTGTCCTCATTAATCCAAATAATCCAACTGGAGCAGTCTATCCGCGTGAAATTCTGCAAGAGATTGTGGATATCGCTAGACAAAATGACTTGATTATTTTTTCAGACGAGGTTTATGACCGTTTAGTTATGGATGGAATGGAGCATATCCCAATTGCTTCTATTGCAGAGGATATTTTTACAGTTACTTTATCTGGCTTATCTAAATCACATCGCATCTGTGGTTTCCGCGTTGGTTGGATGGTATTGTCTGGTCCGCGACAACATGTTAAAGGTTATATTGAAGGTTTGAATATGTTAGCTAACATGAGGCTGTGTTCAAATGTTCTTGCTCAACAGGTTATTCAAACATTCGTTAGGGCGGACAGCAATCTATTGATAGTATGTTTTGTTGGCCCCAGGGAAGGGTTCGTATTCTACCCGAGCCAAAACGTAAATTTTATATCCAAT

SEQ ID NO: 22614 - protein, 212 aa, Streptococcus agalactiae
MSMQALLDNDDEVLVPMPDYPLWTACVSLAGGNAVHYICDEEANWYPDIDDIKSKITSKTKAIVLINPNNPTGAVYPREILQEIVDIARQNDLIIFSDEVYDRLVMDGMEHIPIASIAEDIFTVTLSGLSKSHRICGFRVGWMVLSGPRQHVKGYIEGLNMLANMRLCSNVLAQQVIQTFVRADSNLLIVCFVGPREGFVFYPSQNVNFISN

SEQ ID NO: 22615 - protein, 489 aa, Streptococcus agalactiae
GTGCTGGCTGACATCGAGGCACTCATTGAAGCACTTGTACTGGCTGACGTTGATGCACTCATTGAGGCGCTAGTACTTGCTGACGTCGACGCACTCATTGAAGCACTTGTACTGGCTGACGTCGAGGCACTCATTGAAGCGCTAGTGCTGGCTGACATCGAGGCACTTGTTGAAGAACTTGTGCTGGCTGACATTGACGCACTCATTGAAGCGCTAGTGCTGGCTGACATCGAGGCACTTGTTGAAGAACTTGTGCTGGCTGACATTGACGCACTCGTTGAGGCGCTAGTGCTGGCTGACGTCGACGCACTCATGGAAGCACTGGTGCTGGCTGACGTCGAGGCACTCATTGAGGCGCTAGTGCTGGCTGACGTCGACGCACTCATGGAAGCACTGGTGCTGGCTGACGTCAAGGCACTCATTGAGGCGCTAGTGCTGGCTGATGTCAATGCACTGGTACTTGCACTTGTGGAAGACTTGTACNNNNNT

SEQ ID NO: 22616 - protein, 163 aa, Streptococcus agalactiae
  VARIANT 162, 163: Xaa = Any Amino Acid
MLADIEALIEALVLADVDALIEALVLADVDALIEALVLADVEALIEALVLADIEALVEELVLADIDALIEALVLADIEALVEELVLADIDALVEALVLADVDALMEALVLADVEALIEALVLADVDALMEALVLADVKALIEALVLADVNALVLALVEDLYXX

SEQ ID NO: 22617 - protein, 228 aa, Streptococcus agalactiae; identical to SEQ ID NO: 19083

SEQ ID NO: 22618 - protein, 76 aa, Streptococcus agalactiae; identical to SEQ ID NO: 19084

SEQ ID NO: 22619 - protein, 192 aa, Streptococcus agalactiae
TTGCGTGATGAAAATAGACGACTAACTAATGAAATGGCAGATTATTATTTTACGAACGTAGCAAAAGCAAATTTATTGGATATTATCGTCAACGAAGGTTACATCTTAGATAGCACACTGGAAAAATGTATTGCTAAGTTAGATAACGTTGATAGACAAACACTAGAAAAAAATTGGAGTGATGATAATGAT

SEQ ID NO: 22620 - protein, 64 aa, Streptococcus agalactiae
MRDENRRLTNEMADYYFTNVAKANLLDIIVNEGYILDSTLEKCIAKLDNVDRQTLEKNWSDDND

SEQ ID NO: 22621 - protein, 573 aa, Streptococcus agalactiae
ATGGAGACGGCCCCCGGCTGCTTCTCGTGGCTCGAGCAGCCCATCGGCGACGTGGTGCGGTCGCTCTGCGGGCAGGCGAATGTGCAGCTGAGACTGAATCCCGCCTACGGGAAGAAGCTCGACTATATCTGCCAGTACGACGAGTCGGACTTCGACTTCGTCCGCCGTCTTGCCCTCCAGTATCAGGAGTGGATGTACTATGACGGCACCTCGCTCGTCTTCGGCCGTCCCAAGGACTCGTCGGAGCCGGTGGAATTGGAGTACGGCACGACGCTCTCTTCCCTTGAGATAGGCCTGCAGACGCTTGCCCGTCCCGAGCAGGTGTTCACCTACCATTCCTCTTCCGACCGTGAGATGGACCAGCCCACCCCTGACCTTGCCTACGGCCACGACCAGCTTTCGGGCAAGGCATTCCGCGCCTCGCTGGGCATGTACGGCAGGCCTGCGCGCCAGCACGCGCTTCCCCGCATCCACACGGAGTCCGAACTCATTAAATACATGCGCCGCAAGCAGGCGGCCGATACCGCCGAGACCCACTACGTCACTGCCGAGAGCCATGTGCCNNNNNTTAAT

SEQ ID NO: 22622 - protein, 191 aa, Streptococcus agalactiae
  VARIANT 189, 190: Xaa = Any Amino Acid
METAPGCFSWLEQPIGDVVRSLCGQANVQLRLNPAYGKKLDYICQYDESDFDFVRRLALQYQEWMYYDGTSLVFGRPKDSSEPVELEYGTTLSSLEIGLQTLARPEQVFTYHSSSDREMDQPTPDLAYGHDQLSGKAFRASLGMYGRPARQHALPRIHTESELIKYMRRKQAADTAETHYVTAESHVPXXN

SEQ ID NO: 22623 - protein, 288 aa, Streptococcus agalactiae
ATGTCACCTGAAAAATCATATTCTGCTCAAACTGCACACTTTATTGATGATGAAGTTCGTCACCTTCTTAATGAAGCACGTAATAAGGCAGCTGATATTATCAACGAAAACCGTGATACTCATAAATTAATTGCAGAAGCCCTCTTAAAATATGAGACTCTTGATGCTGCTCAGATTAAATCGATTTTCGAGACAGGTAAAATGCCTGAGACAGAAAATGATGAAGATAAAGCAAGAGCGTTATCATACGATGAAATCAAAGAAAAAATGCAAGAAGAAGATAAAAAA

SEQ ID NO: 22624 - protein, 96 aa, Streptococcus agalactiae
MSPEKSYSAQTAHFIDDEVRHLLNEARNKAADIINENRDTHKLIAEALLKYETLDAAQIKSIFETGKMPETENDEDKARALSYDEIKEKMQEEDKK

SEQ ID NO: 22625 - protein, 510 aa, Streptococcus agalactiae
ATGGGAATAAACCAGTTGATAAGAAGTGAATGGCATATGCCTGCCCACATGGTCAATGCGTATTATGATCCACAACAAAACCAAATTGTCTTCCCAGCAGCCATTTTACAAGCACCATTTTATGCTTTAGAGCAAAGTTCATCAGCAAATTATGGGGGAATTGGTGCAGTGATTGCACATGAAATATCACACGCTTTTGACACTAATGGAGCTTCATTTGATGAACATGGAAGTTTGAATAATTGGTGGACTGATGAAGATTTTGAAGCTTTCAAAAAACTTACAGATAAAGTAGTTGAGCAGTTTGATGGACTAGAATCTTATGGCGCAAAAGTCAATGGTAAACTAACAGTATCAGAAAATGTTGCAGATTTAGGTGGAGTTGCTTGTGCTTTAGAAGCTGCGCAGCGTGAGTCAGATTTTTCAGCGAGGGATTTCTTTATTAACTTTGCGAACATTTGGCGTATGAAGGCACGTGATGAGTATATGCAAATGGTAGCNNNNNTTAAT

SEQ ID NO: 22626 - protein, 170 aa, Streptococcus agalactiae
  VARIANT 168, 169: Xaa = Any Amino Acid
MGINQLIRSEWHMPAHMVNAYYDPQQNQIVFPAAILQAPFYALEQSSSANYGGIGAVIAHEISHAFDTNGASFDEHGSLNNWWTDEDFEAFKKLTDKVVEQFDGLESYGAKVNGKLTVSENVADLGGVACALEAAQRESDFSARDFFINFANIWRMKARDEYMQMVAXXN

SEQ ID NO: 22627 - protein, 84 aa, Streptococcus agalactiae
ATGGAGATATTGACTTTAACTAATACAAATCCTTATGCTTATGCTGAGATGCAAGCTTTAGCATTAGCTCATGCTCTTAATATA

SEQ ID NO: 22628 - protein, 28 aa, Streptococcus agalactiae
MEILTLTNTNPYAYAEMQALALAHALNI

SEQ ID NO: 22629 - protein, 708 aa, Streptococcus agalactiae
ATGAAAAGCCTATTAGATTCAATTAAAGGATATTTCCCATCACCAGATATAAGCAAAGCTAAAGTTGCTATTGATAGCAATAATAAAGAAATATTAGTTAAGTCAAATAAGGATATGCCATTTTCTGCATTTGTATTTAAAACAATTGCTGATCCTTTTGTAGGAAAGCTTTCAATATTTAAGGTGCAAACAGGAGAGCTAACAACTGATAAGATAATTATAAATTCAAAAAATAATAAGGTAGAAAAAGTTAGTTCATTATGCTTTTTAAGAGGTAAAAGTCAAATACAAACAAGTAAAATAGGCGCAGGAGACATAGGAGCTGTTACAAAACTTCAATATACTTCAACTGGTGATACTCTTTGTGAAAGTAACTTTAAGATTGCTTATGAAGGATTTGAGTTCCCAGAGGCAGTTATGACTATGGCAGTATTACCAAAAAGTAAAGGTGATGAAGAAAAAATTTCTCAAGGACTTTCTAAACTTCTAGATGAAGATCCAACATTTAAGGTTTCTAGAGATCAAGAAAATGCAGAAACTCTAGTTTCTGGTATTGGAGAGACACATATAGAGGTTTTAGCTAGTAAATTAAAAAGTAAATTTGGAATTGATGTAATTCTTCAAGATCCTAAGATTCCTTATAGAGAAACTATAAAAGGTAGTTCTGATGTACAAGGAAAAAAAAAAAACAATCTGGAGGCCNNNNNT

SEQ ID NO: 22630 - protein, 236 aa, Streptococcus agalactiae
  VARIANT 235, 236: Xaa = Any Amino Acid
MKSLLDSIKGYFPSPDISKAKVAIDSNNKEILVKSNKDMPFSAFVFKTIADPFVGKLSIFKVQTGELTTDKIIINSKNNKVEKVSSLCFLRGKSQIQTSKIGAGDIGAVTKLQYTSTGDTLCESNFKIAYEGFEFPEAVMTMAVLPKSKGDEEKISQGLSKLLDEDPTFKVSRDQENAETLVSGIGETHIEVLASKLKSKFGIDVILQDPKIPYRETIKGSSDVQGKKKNNLEAXX

SEQ ID NO: 22631 - protein, 108 aa, Streptococcus agalactiae
ATGGGCATTGAGCATTACATCACTTGGCAGAAGGACGGCGTGACTCTTGGCGTTGTCGTTGCATCAGAAGGCTATCCGCTCGATTACGAGAAAAGGTGTGCCACTGCA

SEQ ID NO: 22632 - protein, 36 aa, Streptococcus agalactiae
MGIEHYITWQKDGVTLGVVVASEGYPLDYEKRCATA

SEQ ID NO: 22633 - protein, 120 aa, Streptococcus agalactiae
ATGGCATTATTAGGGACGGTAGGACAAGTTTGCCTCACTGCTTATTTGCCTGCTCTAATTGGACAAGCGGGAGACGTTGTATTATCGCCTCATTCTGTGATATTATTGTTACCTNNNNNT

SEQ ID NO: 22634 - protein, 40 aa, Streptococcus agalactiae
  VARIANT 39, 40: Xaa = Any Amino Acid
MALLGTVGQVCLTAYLPALIGQAGDVVLSPHSVILLLPXX

SEQ ID NO: 22635 - protein, 273 aa, Streptococcus agalactiae
TTGCAAGATGACTTAAGAGGAAAGAACGTTGATAAAGTCAAAGCACTAGCGACTGAAAAAAAAGTATCCATTTCCTGGACTCCTAAAAAAACCTTATCAGACATGACAAATGGTGGAGTTCACCAAGGATTCGTTCTAAAAGTTTCGGAATTTGCCTATGCGGATTTATCAGAGATAATGACAAAGGCAGAGAATGAAGAAAATCCTCTCATTTTAATCCTTGATGGTCTGACCGACCCTCACAACCTAAGTTCTATTCTACGCACANNNNNT

SEQ ID NO: 22636 - protein, 91 aa, Streptococcus agalactiae
  VARIANT 90, 91: Xaa = Any Amino Acid
MQDDLRGKNVDKVKALATEKKVSISWTPKKTLSDMTNGGVHQGFVLKVSEFAYADLSEIMTKAENEENPLILILDGLTDPHNLSSILRTXX

SEQ ID NO: 22637 - protein, 168 aa, Streptococcus agalactiae
TTGCGCCACTATAATGAGATTACTGACGTTCATATCACTGATGATGAATTTTTGAAATTACTACATGAGTTGGAAAGTGATGCCCTTGTGGGAATGTCATTGATATTTTTGATTTCAATGGTCAATTATTCCTGGTCTTATCGTTCGTGGCAGGAAACGATGTTCTTT

SEQ ID NO: 22638 - protein, 56 aa, Streptococcus agalactiae
MRHYNEITDVHITDDEFLKLLHELESDALVGMSLIFLISMVNYSWSYRSWQETMFF

SEQ ID NO: 22639 - protein, 171 aa, Streptococcus agalactiae
GTGGCAGGAAACGATGTTCTTTTAGTAGGAAATAAAAAAGATATTCTTCCCAAATCGGTTAAAGATGGAAAAGTAACACAATGGTTAACTGAGAGAGCTCATGAAGAAGGGGCTTCCGTCCTGGTTGATGTCATCTTGACAAGTGCCCAAAATCATCATGCNNNNNTTAAT

SEQ ID NO: 22640 - protein, 57 aa, Streptococcus agalactiae
  VARIANT 55, 56: Xaa = Any Amino Acid
MAGNDVLLVGNKKDILPKSVKDGKVTQWLTERAHEEGASVLVDVILTSAQNHHAXXN

SEQ ID NO: 22641 - protein, 525 aa, Streptococcus agalactiae
GTGTACTTCCGGTTTCATAGGTCTCGCTCACTAACACGACATGTAGGCCAAGGATCTGTATTAGGCCATGACCTTATGCGTCCATATGTCTTACTAAGAGACGAAGCGCGCGTGCGAAAGGTTGAGGTTAGCTCCCCGCTTCCGGCAAAGCCAAAGAGTATCAGCACCAAACAATGGACATCAGCATCAGAATTTTTATCTTACGTTGACGAAATCCTGGGGACGCAGCCCCGCCGCGGGTCGTTTAATTCTATAACAAGCCCTCCAGAAGCCCTCCCCAGTCAAGAATCCGCTGACAGGGCGTTCTCTTGTAAAGATACTATTGATATGGCAATTCTACAGAGTAACCAATCCTGCGCATCAAGGCAAAGCACAAACCGTTTCGAAATATCGCGCAACGGTCGACGTATTGCTGAGGTTGTATTGAATCGGCCAGCTCACCGCCTTGGAGAAACAGTCGTGGCGACAATTGATTTTTCCAACGCTGCACTCCCTTGCTACTGTCTTCGCGGCTCNNNNNTTAAT

SEQ ID NO: 22642 - protein, 175 aa, Streptococcus agalactiae
  VARIANT 173, 174: Xaa = Any Amino Acid
MYFRFHRSRSLTRHVGQGSVLGHDLMRPYVLLRDEARVRKVEVSSPLPAKPKSISTKQWTSASEFLSYVDEILGTQPRRGSFNSITSPPEALPSQESADRAFSCKDTIDMAILQSNQSCASRQSTNRFEISRNGRRIAEVVLNRPAHRLGETVVATIDFSNAALPCYCLRGSXXN

SEQ ID NO: 22643 - protein, 648 aa, Streptococcus agalactiae
ATGGGAAGCGTTGCTCATGCAAGTGAGCTTGTAAAGGACGATAGTGTGAAGACTACCGAGGTTGCAGCTAAGCCCTATCCAAGTATGGCTCAAACAGATCAAGGAAATAATTCATCATCCTCGGAACTTGAGACAACAAAGATGGAAATTCCTACAACAGACATAAAAAAAGCTGTTGAACCGGTCGAGAAAACAGCTGGGGAAACATCTGCCACTGATACTGGAAAACGAGAGAAACAATTACAACAATGGAAAAATAATCTAAAAAATGATGTGGATAACACAATTCTATCTCATGAACAGAAAAATGAGTTTAAAACAAAAATTGATGAAACAAATGATTCTGATGCATTATTAGAATTAGAAAATCAATTTAACGAAACTAATAGACTGTTACACATCAAACAACATGAAGAAGTTGAGAAAGATAAGAAAGCTAAGCAACAGAAAACTCTGAAACAGTCAGATACGAAAGTAGATCTAAGCAATATTGACAAAGAGCTTAATCATCAAAAAAGTCAAGTTGAAAAAATGGCAGAGCAAAAGGGAATCACAAATGAAGATAAAGATTCTATGCTGAAAAAATCGAAGATATTCGTAAACAAGCTCAACAAGCAGAATAAAAAGAAGATGCCGAAAGTAAGGTCG

SEQ ID NO: 22644 - protein, 216 aa, Streptococcus agalactiae
MGSVAHASELVKDDSVKTTEVAAKPYPSMAQTDQGNNSSSSELETTKMEIPTTDIKKAVEPVEKTAGETSATDTGKREKQLQQWKNNLKNDVDNTILSHEQKNEFKTKIDETNDSDALLELENQFNETNRLLHIKQHEEVEKDKKAKQQKTLKQSDTKVDLSNIDKELNHQKSQVEKMAEQKGITNEDKDSMLKKSKIFVNKLNKQNKKKMPKVRS

SEQ ID NO: 22645 - protein, 741 aa, Streptococcus agalactiae
GTGACACCAAAACCAGTACCGGATAAAGATAAATATGATCCAACAGGAGGGGAAACAACAGTACCCCAAGGGACACCAGTTTCAGATAAAGAAATCACAGACTTAGTTAAGATTCCAGATGGCTCAAAAGGGGTTCCGACAGTTGTTGGTGATCGTCCAGATACTAACGTTCCTGGAGATCATAAAGTAACGGTAGAAGTAACGTATCCAGATGGAACAAAGGATACAGTAGAAGTAACGGTTCATGTGACACCAAAACCAGTACCGGATAAAGATAAATATGATCCAACAGGAGGGGAAACAACAGTACCCCAAGGGACACCAGTTTCAGATAAAGAAATCACAGACTTAGTTAAGATTCCAGATGGCTCAAAAGGGGTTCCGACAGTTGTTGGTGATCGTCCAGATACTAACGTTCCTGGAGATCATAAAGTAACGGTAGAAGTAACGTATCCAGATGGAACAAAGGATACAGTAGAAGTAACGGTTCATGTGACACCAAAACCAGTACCGGATAAAGATAAATATGATCCAACAGGAGGGGAAACAACAGTACCCCAAGGGACACCAGTTTCAGATAAAGAAATCACAGACTTAGTTAAGATTCCAGATGGCTCAAAAGGGGTTCCGACAGTTGTTGGTGATCGTCCAGATACTAACGTTCCTGGAGATCATAAAGTAACGGTAGAAGTAACGTATCCAGATGGAACAAAGGATACAGTAGAAGTAACGGTTNNNNNT

SEQ ID NO: 22646 - protein, 247 aa, Streptococcus agalactiae
  VARIANT 246, 247: Xaa = Any Amino Acid
MTPKPVPDKDKYDPTGGETTVPQGTPVSDKEITDLVKIPDGSKGVPTVVGDRPDTNVPGDHKVTVEVTYPDGTKDTVEVTVHVTPKPVPDKDKYDPTGGETTVPQGTPVSDKEITDLVKIPDGSKGVPTVVGDRPDTNVPGDHKVTVEVTYPDGTKDTVEVTVHVTPKPVPDKDKYDPTGGETTVPQGTPVSDKEITDLVKIPDGSKGVPTVVGDRPDTNVPGDHKVTVEVTYPDGTKDTVEVTVXX

SEQ ID NO: 22647 - protein, 126 aa, Streptococcus agalactiae
TTGAATTGCATTACGCCAGATAATGTACACGTTATGATGGACGGGAAGGTAGTATTGTCAGGAGGACCAGAATTAGCGGTTCGCCTTGAGAATGAAGGTTATGCTCAAATCGTTGAAGAGNNNNNT

SEQ ID NO: 22648 - protein, 42 aa, Streptococcus agalactiae
  VARIANT 41, 42: Xaa = Any Amino Acid
MNCITPDNVHVMMDGKVVLSGGPELAVRLENEGYAQIVEEXX

SEQ ID NO: 22649 - protein, 96 aa, Streptococcus agalactiae
ATGGCTACTCTTCAATACATGCGAGAATACCGCACTTATGAACAAATTGAGGGTGATTTTGGCATTCACGAAAGCAACTTAATCCGTCGANNNNNT

SEQ ID NO: 22650 - protein, 32 aa, Streptococcus agalactiae
  VARIANT 31, 32: Xaa = Any Amino Acid
MATLQYMREYRTYEQIEGDFGIHESNLIRRXX

SEQ ID NO: 22651 - protein, 111 aa, Streptococcus agalactiae
TTGTTAAAGGGCCTCAAGGCTATTGATGATATAAAAGTTGGCTCTCCTATTTTTAAGGATTTTTGGACTTCTTTAAGTTTACTAGCACGCCTCAAAGCTTTNNNNNTTAAT

SEQ ID NO: 22652 - protein, 37 aa, Streptococcus agalactiae
  VARIANT 34, 35, 36: Xaa = Any Amino Acid
MLKGLKAIDDIKVGSPIFKDFWTSLSLLARLKAXXXN

SEQ ID NO: 22653 - protein, 753 aa, Streptococcus agalactiae
GTGTTTTTACTATTATGTATTTTATCGATGTGGCTCATGATTTTGGGGGTTGCATTTTATTACTTTGGGTCGCTACATCAATCATTGACTTCAAGGATTATTTATCAGTTTGTACTTACTGTTTTGCTAACGACAATAGCTTGGTTCATGGGTGCCTATTTTTTAGGATTTGAAGGTCATTTTAAAACTGTCTTTCAATTCCAAGAAGCAGATGGTAAACAAATTGTAAATTGTTTATTTCAACTTTGTTTCGCCCTTTACGCAGTAGTAATGCTTATTGGGTCAATTATTGATAGAGTTCAGACGAAGCGACTTTTATTAGCTGTTGTTTCTTGGCTTTTCTTGGTGTATACGCCCTTAGCTTATTTAATTTGGAATTCAGAGGGTGTTTTTGCAAAGATGGGAGTACTTGATTTTTCAGGCGGAATGGTCGTTCATTTATCTGCAGGGCTTTCTTCGTATATTTTAGCTCATGTTATTGGCAAGAGTGAACATCAGCACAATAAGGTTAAAAATGATAATCTCTTTTTAGGAATGATCTATTAATTTGGTTGGTTTGGATTTAATATGGGTCCAGTTGGTGAGTGGAATTCACAAGCTATTATGATACTTTTAAATACTATATTTGCTATTATAGGTGGTGGTTTGGCGTGGACATTGGCTGCTAAGTGGAATGGTGAGGAAGAGAAAACAGGAAGCTTATTGAATGGCATTATAGTTGGTCTTGTGACGAGTACAGCACTTCCANNNNNT

SEQ ID NO: 22654 - protein, 252 aa, Streptococcus agalactiae
  VARIANT 251, 252: Xaa = Any Amino Acid
MFLLLCILSMWLMILGVAFYYFGSLHQSLTSRIIYQFVLTVLLTTIAWFMGAYFLGFEGHFKTVFQFQEADGKQIVNCLFQLCFALYAVVMLIGSIIDRVQTKRLLLAVVSWLFLVYTPLAYLIWNSEGVFAKMGVLDFSGGMVVHLSAGLSSYILAHVIGKSEHQHNKVKNDNLFLGMILITFGWFGFNMGPVGEWNSQAIMILLNTIFAIIGGGLAWTLAAKWNGEEEKTGSLLNGIIVGLVTSTALPXX

SEQ ID NO: 22655 - protein, 342 aa, Streptococcus agalactiae
GTGACACCAAAACCAGTACCGGATAAAGATAAATATGATCCAACAGGAGGGGAAACAACAGTACCCCAAGGGACACCAGTTTCAGATAAAGAAATCACAGACTTAGTTAAGATTCCAGATGGCTCAAAAGGGGTTCCGACAGTTGTTGGTGATCGTCCAGATACTAACGTTCCTGGAGATCATAAAGTAACGGTAGAAGTAACGTATCCAGATGGAACAAAGGATACAGTAGAAGTAACGGTTCATGTGACACCAAAACCAGTACCGGATAAAGATAAATATGATCCAACAGGAGGGGAAACAACAGTACCCCAAGGGACACCAGTTCNNNNNTTAATTAAT

SEQ ID NO: 22656 - protein, 114 aa, Streptococcus agalactiae
  VARIANT 110, 111: Xaa = Any Amino Acid
MTPKPVPDKDKYDPTGGETTVPQGTPVSDKEITDLVKIPDGSKGVPTVVGDRPDTNVPGDHKVTVEVTYPDGTKDTVEVTVHVTPKPVPDKDKYDPTGGETTVPQGTPVXXLIN

SEQ ID NO: 22657 - protein, 303 aa, Streptococcus agalactiae
GTGACACCAAAACCAGTACCGGATAAAGATAAATATGATCCAACAGGAGGGGAAACAACAGTACCCCAAGGGACACCAGTTTCAGATAAAGAAATCACAGACTTAGTTAAGATTCCAGATGGCTCAAAAGGGGTTCCGACAGTTGTTGGTGATCGTCCAGATACTAACGTTCCTGGAGATCATAAAGTAACGGTAGAAGTAACGTATCCAGATGGAACAAAGGATACAGTAGAAGTAACGGTTCATGTGACACCAAAACCAGTACCGGATAAAGATAAATATGATCCCACAGGNNNNNTTAAT

SEQ ID NO: 22658 - protein, 101 aa, Streptococcus agalactiae
  VARIANT 99, 100: Xaa = Any Amino Acid
MTPKPVPDKDKYDPTGGETTVPQGTPVSDKEITDLVKIPDGSKGVPTVVGDRPDTNVPGDHKVTVEVTYPDGTKDTVEVTVHVTPKPVPDKDKYDPTGXXN

SEQ ID NO: 22659 - protein, 236 aa, Streptococcus agalactiae
TTGGTAACCTATGATCAACGCTTGTCAAACATTTTTAAAAATAACTTAGGTTAACTGCTATTTTTGATACGGTTGATAATGCTAATGTAGCTGCGAGACAATTGAATTATCAAGTACGTTTAGTAACCTTAGATGGAACAGAGTTACGCCCTGAAGGGTCGTACTCAGGGGGAGCAAATCGTCAAAATAATACTGTTTTTATCAAGCCTGAATTGGATAATCNNNNNTTAATTAAT

SEQ ID NO: 22660 - protein, 79 aa, Streptococcus agalactiae
  VARIANT 17, 75, 76: Xaa = Any Amino Acid
MVTYDQRLSNIFKNNLXLTAIFDTVDNANVAARQLNYQVRLVTLDGTELRPEGSYSGGANRQNNTVFIKPELDNXXLIN

SEQ ID NO: 22661 - protein, 114 aa, Streptococcus agalactiae
ATGTCAGCCAGCACAAGTGCTTCAATGAGTGCCTCAACAAGTGCAAGTAATAGCGCTTCAACAAGTGCAAGTATGAGCGCCTCAACCAGTGCAAGTAGTAGTGCNNNNNTTAAT

SEQ ID NO: 22662 - protein, 38 aa, Streptococcus agalactiae
  VARIANT 36, 37: Xaa = Any Amino Acid
MSASTSASMSASTSASNSASTSASMSASTSASSSAXXN

SEQ ID NO: 22663 - protein, 174 aa, Streptococcus agalactiae
ATGCGTGCTTTATCTATACGTGGTGCAGGAAATATTTTAGGAGCTTCACAAAGTGGTTTTACTGATTCGGTTGGATTCGAGATGTATTCACAGCTTCTAGAGCCAGCGATTGCCACCAAACAAGGGAAATCATTAATTCGTCAAAAAGGTAATGTTGAATNNNNNTTAATTAAT

SEQ ID NO: 22664 - protein, 58 aa, Streptococcus agalactiae
  VARIANT 54, 55: Xaa = Any Amino Acid
MRALSIRGAGNILGASQSGFTDSVGFEMYSQLLEPAIATKQGKSLIRQKGNVEXXLIN

SEQ ID NO: 22665 - protein, 303 aa, Streptococcus agalactiae
ATGAATCTTTTCTTAATTATCCTTGTGGGGGTTATCGCTGTCTTACCGACAACCGGATATGACTTTGTACTGAATGGACTTTTACGTACAGATAAAAGCAAAAGGTATATTTTACAGACTAGTTGGTGTATCAACACTTTTAATAACTTGTCAGGATTCCGTGGCTTAATCGATATTGGGTTGCCCATGGCTTTTTATGGTAAAAAAGGTCAAGAAAAAAGTGATCTAAGAAAAATGACTCCTTTTTTACCCTATCTTATTTCTGGTCTGTCATTTATTAATGTGATTGNNNNNTTAATTAAT

SEQ ID NO: 22666 - protein, 101 aa, Streptococcus agalactiae
  VARIANT 97, 98: Xaa = Any Amino Acid
MNLFLIILVGVIAVLPTTGYDFVLNGLLRTDKSKRYILQTSWCINTFNNLSGFRGLIDIGLPMAFYGKKGQEKSDLRKMTPFLPYLISGLSFINVIXXLIN

SEQ ID NO: 22667 - protein, 543 aa, Streptococcus agalactiae
TTGTTTTATAAAACTAGCAACCGCAAATGGAATGTATCTAATTTACTGAGCTTTTCTTTGCAGGTTAAGGAAGATATGGGACTGGATTACAGCTATACGCAGCCGTCGCTATCGGAGGAGTATGGTGACAACTCAGCCGACAGTGGCTACAGCCAAATGGAGGCTGATATACTGCTGGACCAAACTGAGATTGAATCCGCGCGGCGTCAGTACCCTCCGCAGCCTGAAGTTGAGTTTGGCTTCCCCAAGGAATGCTACTGTGGTGGCGAACCGCTTGTAGCCACATCTTACACAAGAAATGACCCTGGGAGAAGATACTACACCTGTGAGAACATCGACGACGGAGACTGCCATGTTTGGAAATGGTGGGATGTGGCGGCTACCGAGGAGATCAGAGCCCTATCGAGACATTGCGGCCAGCTCTCGGATAAGGTTGATTATCTAACGTGTGTGAGTGACTACGACACGCAGCTTAACCAGGTAAAGGAATTGCATTACGAGGCAGAGCAGAAGTTGGTTAGCCTTGAGAGAATTAGAATAACT

SEQ ID NO: 22668 - protein, 181 aa, Streptococcus agalactiae
MFYKTSNRKWNVSNLLSFSLQVKEDMGLDYSYTQPSLSEEYGDNSADSGYSQMEADILLDQTEIESARRQYPPQPEVEFGFPKECYCGGEPLVATSYTRNDPGRRYYTCENIDDGDCHVWKWWDVAATEEIRALSRHCGQLSDKVDYLTCVSDYDTQLNQVKELHYEAEQKLVSLERIRIT

SEQ ID NO: 22669 - protein, 429 aa, Streptococcus agalactiae
GTGACACCAAAACCAGTACCGGATAAAGATAAATATGATCCAACAGGAGGGGAAACAACAGTACCCCAAGGGACACCAGTTTCAGATAAAGAAATCACAGACTTAGTTAAGATTCCAGATGGCTCAAAAGGGGTTCCGACAGTTGTTGGTGATCGTCCAGATACTAACGTTCCTGGAGATCATAAAGTAACGGTAGAAGTAACGTATCCAGATGGAACAAAGGATACAGTAGAAGTAACGGTTCATGTGACACCAAAACCAGTACCGGATAAAGATAAATATGATCCAACAGGAGGGGAAACAACAGTACCCCAAGGGACACCAGTTTCAGATAAAGAAATCACAGACTTAGTTAAGATTCCAGATGGCTCAAAAGGGGTTCCGACAGTTGTTGGTGATCGTCCAGATACTAACGTGTCATGGAGATCA

SEQ ID NO: 22670 - protein, 143 aa, Streptococcus agalactiae
MTPKPVPDKDKYDPTGGETTVPQGTPVSDKEITDLVKIPDGSKGVPTVVGDRPDTNVPGDHKVTVEVTYPDGTKDTVEVTVHVTPKPVPDKDKYDPTGGETTVPQGTPVSDKEITDLVKIPDGSKGVPTVVGDRPDTNVSWRS

SEQ ID NO: 22671 - protein, 435 aa, Streptococcus agalactiae
TTGCCCACGGCGATTCTCTCACGGGAAAATCTTCTCATTGAAACAGCGAAGCAGCAGCGGGAGCTTCAGTGGTACAAGGACCGATGTAGGGAGCAGGAAGTTGCACTGTGCGCTGTGAATGAGAAACAAGCAGTCCTCGAAGATGCCCTCATTGGTGCTCGCATTGCAGCACTTAACGAGAAGGAACGTCGCCGTGAGTTTGTAGCCATGGCTGCAGCGCAGCGGCGTGAGGCTCGATTGGCGCTCGAACCGCAAGTCCATGCCTTACGCGTTATGGAAGGTGAACTGGGTGGATTGAGACGAGAGCTGAGGCACACTCGAAAGCTGTTAGAACAGTCTGAGAAGGAGCGCGTGGCTTTGACCGAGTGTAAAGGAAGGTACGAAGCGGAACTGGGGAAGCTGAGGAATGTAAATGAGAGAATACACGGTNNNNNT

SEQ ID NO: 22672 - protein, 145 aa, Streptococcus agalactiae
  VARIANT 144, 145: Xaa = Any Amino Acid
MPTAILSRENLLIETAKQQRELQWYKDRCREQEVALCAVNEKQAVLEDALIGARIAALNEKERRREFVAMAAAQRREARLALEPQVHALRVMEGELGGLRRELRHTRKLLEQSEKERVALTECKGRYEAELGKLRNVNERIHGXX

SEQ ID NO: 22673 - protein, 111 aa, Streptococcus agalactiae
ATGGGAGGACATCGAGCAGGAAATATTGCTAGCGAGATGTCTGTAACTGATTTAGGAAGTGATTGGGCGGAGACAGATTCATCTGAGTTATCAGAAATATCGCGANNNNNT

SEQ ID NO: 22674 - protein, 37 aa, Streptococcus agalactiae
  VARIANT 36, 37: Xaa = Any Amino Acid
MGGHRAGNIASEMSVTDLGSDWAETDSSELSEISRXX

SEQ ID NO: 22675 - protein, 144 aa, Streptococcus agalactiae
ATGTTGCAACTTGGAATTGTCGGTTTAGGAGGTATTTCACAGAAAGCTTATCTACCTTATATGCGTCAAGTGACAGGCGTGCACTGGCATCTTTTTACACGCCAGAAACATATTTTAAAACAAGTTAATATGCTNNNNNTTAAT

SEQ ID NO: 22676 - protein, 48 aa, Streptococcus agalactiae
  VARIANT 46, 47: Xaa = Any Amino Acid
MLQLGIVGLGGISQKAYLPYMRQVTGVHWHLFTRQKHILKQVNMLXXN

SEQ ID NO: 22677 - protein, 120 aa, Streptococcus agalactiae
ATGCCTAGAGAGTTGATTGGTGAAACAGTAGGAGAAGTAAGAGCAGTTGCAGATATGCACCAAAGGAAAGCTGAGATGGGTAAGCACTGTGATGCTTTTATTGCCTTACCAGGTNNNNNT

SEQ ID NO: 22678 - protein, 40 aa, Streptococcus agalactiae
  VARIANT 39, 40: Xaa = Any Amino Acid
MPRELIGETVGEVRAVADMHQRKAEMGKHCDAFIALPGXX

SEQ ID NO: 22679 - protein, 306 aa, Streptococcus agalactiae
TTGAGACCTCAACACGGTCAGAGATATCAAGAATACCTTAGCATCTATACAGAGGAAGAGACAGAGAGGGCAGAGAAATGGAAAAACTTTCTTGACCGACAAGAAGACAGAACCGCTGAACCTTGTTCCCCAGATGAGGAGTTTCAGGATACATTTCAGGCTGATGGTTTGGAATCTGGAGAGGATAGTGATTCAGAATCGCAGGAGGGTTCAAGAAATGGGAAACGTGAAGATTGTGAACTTAGTGGTACCAGTGAGCAGCAACTTGAACAAGATACGACTGAAACAGTTGGTGANNNNNTTAAT

SEQ ID NO: 22680 - protein, 102 aa, Streptococcus agalactiae
  VARIANT 99, 100, 101: Xaa = Any Amino Acid
MRPQHGQRYQEYLSIYTEEETERAEKWKNFLDRQEDRTAEPCSPDEEFQDTFQADGLESGEDSDSESQEGSRNGKREDCELSGTSEQQLEQDTTETVGXXXN

SEQ ID NO: 22681 - protein, 327 aa, Streptococcus agalactiae
GTGACACCAAAACCAGTACCGGATAAAGATAAATATGATCCAACAGGAGGGGAAACAACAGTACCCCAAGGGACACCAGTTTCAGATAAAGAAATCACAGACTTAGTTAAGATTCCAGATGGCTCAAAAGGGGTTCCGACAGTTGTTGGTGATCGTCCAGATACTAACGTTCCTGGAGATCATAAAGTAACGGTAGAAGTAACGTATCCAGATGGAACAAAGGATACAGTAGAAGTAACGGTTCATGTGACACCAAAACCAGTACCGGATAAAGATAAATATGATCCAACAGGGAGGGGAACAACAGTACCCCNNNNNTTAATTAAT

SEQ ID NO: 22682 - protein, 109 aa, Streptococcus agalactiae
  VARIANT 105, 106: Xaa = Any Amino Acid
MTPKPVPDKDKYDPTGGETTVPQGTPVSDKEITDLVKIPDGSKGVPTVVGDRPDTNVPGDHKVTVEVTYPDGTKDTVEVTVHVTPKPVPDKDKYDPTGRGTTVPXXLIN

SEQ ID NO: 22683 - protein, 285 aa, Streptococcus agalactiae
ATGAGAAATCCAGAATATGTATTAAAAAGTCTAAAAAATAAAAGTGAAGATGCCAATTATAAATATGACAGACTTTATAGAAATCTATACAATGTGAATTTCTTTCTAAAAGCATATGGAAATATATATGCAAAGGAAGGAAACATGACAGAAGGTATAGATAGTAAAACCATAGATGGAATGAGTATTAAAAGAATTGGAAAGTTAATAGAAAAATTAAAAGATGAGAAATATGTTCCTAATCCAGTAAAAAGGACATATATTCCCGAGGNNNNNTTAATTAAT

SEQ ID NO: 22684 - protein, 95 aa, Streptococcus agalactiae
  VARIANT 91, 92: Xaa = Any Amino Acid
MRNPEYVLKSLKNKSEDANYKYDRLYRNLYNVNFFLKAYGNIYAKEGNMTEGIDSKTIDGMSIKRIGKLIEKLKDEKYVPNPVKRTYIPEXXLIN

SEQ ID NO: 22685 - protein, 354 aa, Streptococcus agalactiae
ATGATATGGAGCAAGTTAAGCTCAAGTATAAATTATTATATTAATAAGAGAATATGGGGAGAAGAACTTTTAAAAGAAAATATTTTATTATTAAATCAATATATTGAGGATGCGTTCATACTTGAGGATGGTATTTATAAATATTTAGATAAAAAAACATATAAGTATATTGATCTAAGTGAAGAAGATATGAAAAAAATAGAGGAAGCTTTTATTGAGAGATTAGAGAAAAAAAGAAAAGTAAATAAAGACAAAGAAAATTTTAAAAATCATATGATAATGATTACTGAGTATTTAGAAAATGAAAAAAGTAAAGAGAAAAGTAATGTTATAGAATTAAAAAATTATAGAAAA

SEQ ID NO: 22686 - protein, 118 aa, Streptococcus agalactiae
MIWSKLSSSINYYINKRIWGEELLKENILLLNQYIEDAFILEDGIYKYLDKKTYKYIDLSEEDMKKIEEAFIERLEKKRKVNKDKENFKNHMIMITEYLENEKSKEKSNVIELKNYRK

SEQ ID NO: 22687 - protein, 186 aa, Streptococcus agalactiae
ATGGCAGGAAATAGAGATTTACGTAATGCTAATAAAGCAAAAAAAGATGAGTTTTATACACAACTTTCAGATATTGAAAAAGAAATTAGATATTATAAAGATCAATTTAAAGATAAAGTTATTTTTTGTAACTGTGATGATCCTTATGAAAGTATTTTTTTAATATTTTGCTTTAATTTTATTTAT

SEQ ID NO: 22688 - protein, 62 aa, Streptococcus agalactiae
MAGNRDLRNANKAKKDEFYTQLSDIEKEIRYYKDQFKDKVIFCNCDDPYESIFLIFCFNFIY

SEQ ID NO: 22689 - protein, 441 aa, Streptococcus agalactiae
GTGCTGGCTGATGTCGATGCACTGGTACTTGCACTTGTGGAAGAACTTGTACTTGCCGATGTTGAGGCGCTAGTACTTGCTGATGTGGAAGCACTCGTACTTGCACTTGTTGAAGCGCTGGTACTTGCTGATGTCGATGCACTCATTGAGGCGCTAGTACTTGCACTTGTGGAAGCACTGGTGCTGGCTGACGTCGATGCACTCATTGAGGCGCTAGTACTTGCTGACGTGGATGCACTGGTACTTGCACTTGTGGAAGCGCTCATACTTGCTGACGTGGATGCACTGATACTTGCACTTGTGGAGGCGCTAGTACTTGCTGACGTGGATGCACTGGTACTTGCACTTGTGGAAGCGCTCATACTTGCTGACGTGGATGCACTGATACTTGCACTTGTGGAGGCAATCATACTTGCTGACGTGGATGNNNNNTTAATTAAT

SEQ ID NO: 22690 - protein, 147 aa, Streptococcus agalactiae
  VARIANT 143, 144: Xaa = Any Amino Acid
MLADVDALVLALVEELVLADVEALVLADVEALVLALVEALVLADVDALIEALVLALVEALVLADVDALIEALVLADVDALVLALVEALILADVDALILALVEALVLADVDALVLALVEALILADVDALILALVEAIILADVDXXLIN

SEQ ID NO: 22691 - protein, 240 aa, Streptococcus agalactiae
ATGTATGTTATAGATGTTAATTCAGGTAAGAATACAAATCATAACAATGAAGAAAAAACTGCCTATGAGAGTAATAAAAATGCGGCAATAGAAATTGCTAGACAAATTAAAATTAGGAATTTAGGTGGAATAATATTAGTTGATTTTATAGATATGTATTCACAGGAAAACAAGAAGAAAATATTAGAAATACTAAAAGATGAGTTTAAAAGTGATAGTCAAAGAGCTAANNNNNTTAAT

SEQ ID NO: 22692 - protein, 80 aa, Streptococcus agalactiae
  VARIANT 77, 78, 79: Xaa = Any Amino Acid
MYVIDVNSGKNTNHNNEEKTAYESNKNAAIEIARQIKIRNLGGIILVDFIDMYSQENKKKILEILKDEFKSDSQRAXXXN

SEQ ID NO: 22693 - protein, 117 aa, Streptococcus agalactiae
ATGGTAAGAATAACTGATGATATTTTATATAGAGTTGAGAAGCCATCTAAATATGTAAGTGGAGAACTTAATGAAGTGATAATAGACCCAAAAGAAGCTGATANNNNNTTAATTAAT

SEQ ID NO: 22694 - protein, 39 aa, Streptococcus agalactiae
  VARIANT 35, 36: Xaa = Any Amino Acid
MVRITDDILYRVEKPSKYVSGELNEVIIDPKEADXXLIN

SEQ ID NO: 22695 - protein, 111 aa, Streptococcus agalactiae
GTGGAACGTTCGTATATGGCAGTGGAAAAGAAAGAAGATCGCGATAAGTTAGAAGAATATTTCAAACAAAAACTTAATCCTCTGGTAATGTCTGGTGNNNNNTTAATTAAT

SEQ ID NO: 22696 - protein, 37 aa, Streptococcus agalactiae
  VARIANT 33, 34: Xaa = Any Amino Acid
MERSYMAVEKKEDRDKLEEYFKQKLNPLVMSGXXLIN

SEQ ID NO: 22697 - protein, 153 aa, Streptococcus agalactiae
ATGCGTCGTCGTCTAGATTGGTACATTGATCGGGAGGGTGAACAAGGGACCAGTGATAACGTTGTTGGAACATGTATGGATATCGAAAAATCTTACTTCCGTCTTACTTCGGTTAGTTTCTCGTTCTTTAGTCTTTTAATCATAGTTCAAATG

SEQ ID NO: 22698 - protein, 51 aa, Streptococcus agalactiae
MRRRLDWYIDREGEQGTSDNVVGTCMDIEKSYFRLTSVSFSFFSLLIIVQM

SEQ ID NO: 22699 - protein, 387 aa, Streptococcus agalactiae
GTGTTCTACGTATTCCAGATTAAGATATTGTTTGGTTTTCATAAAAGTTACAATTTAGATGTTTTACAGGTTTACCATCTCTCTGGTGATGAACGTGCTTCAAGAACTGGTAGTAAAAATTTCGGCAATACTAATGAAGAACAGCAAAAATGTAACGAAATAGCTATAGCCACTGGTACACAGATTGAAATTTGTGAAGCTAAAGATCATTCTTTAACACTTCTAATCACTGGGAAGCGTCAACGGGTTGAAGAAGCACGCTCACATATTGCACGCAGGCTAAAGACCCAGGCGGCTCGTGAAATTGCAATACCGAAAGAACACCATCGTGTTTTAATTGGTGTGTTCGAAATAGCTTTGTTAATTAGTAGTATTACTCGTTTTATT

SEQ ID NO: 22700 - protein, 129 aa, Streptococcus agalactiae
MFYVFQIKILFGFHKSYNLDVLQVYHLSGDERASRTGSKNFGNTNEEQQKCNEIAIATGTQIEICEAKDHSLTLLITGKRQRVEEARSHIARRLKTQAAREIAIPKEHHRVLIGVFEIALLISSITRFI

SEQ ID NO: 22701 - protein, 615 aa, Streptococcus agalactiae
ATGAAGTCTAGTTATCGTCGTGGTGAAGCAGTATTTGAACTGCCCGATGATATTGAGGTTGAAAGTGCAATAAAGGCGATTGATGAAGCAAATTACCAAGCCGGAGAAATTGAAGAAGTATCATCACTAGAAAACGTGGCGTTAATTAATGAAGACAATTATGACCTTCTTATTATTGGTTCTGGTGCTGCTGCCTTTTCTTCGGCAATTAAAGCTATAGAATACGGTGCAAAAGTTGGAATGATTGAGCGTGGAACGGTTGGGGGAACCTGTGTGAATATTGGCTGTGTTCCGTCAAAAACTCTTCTTAGGGCAGGGGAAATCAATCATTTATCAAAAGACAATCCGTTTATAGGTTTACAAACATCCGCTGGAGAAGTGGATTTAGCTAGTTTAATCACGCAAAAGGATAAATTGGTGAGCGAACTTCGGAATCAAAAATATATGGATTTAATTGATGAATATAATTTTGATTTAATTAAAGGTGAAGCAAAATTCGTTGATGCTAGTACGGTTGAGGTCAATGGGACAAAGTTATCTGCAAAACGCTTTTTAATTGCAACAGGTGCATCGCCTTCGTTGCCCCAAATTTCAGGACTGAAAAANNNNNTTAAT

SEQ ID NO: 22702 - protein, 205 aa, Streptococcus agalactiae
  VARIANT 202, 203, 204: Xaa = Any Amino Acid
MKSSYRRGEAVFELPDDIEVESAIKAIDEANYQAGEIEEVSSLENVALINEDNYDLLIIGSGAAAFSSAIKAIEYGAKVGMIERGTVGGTCVNIGCVPSKTLLRAGEINHLSKDNPFIGLQTSAGEVDLASLITQKDKLVSELRNQKYMDLIDEYNFDLIKGEAKFVDASTVEVNGTKLSAKRFLIATGASPSLPQISGLKXXXN

SEQ ID NO: 22703 - protein, 640 aa, Streptococcus agalactiae
ATGAAAGAAATATTTTTAATTTTTATATCTCAAAATAATACATTAACTAACTTAGAACGTACTTTAAGAACATATTTTGATAGAGTCATAATAAATGATTCTACAAGTTTTACTTTACCTAAAGAGTTTAAAAAGAAGTTTCCGGGTTCCGGAGGAGTCGCTTCTCCATCATCAATAAAAGTACAGTTGCAATATGAGTTGTTACCGGTTCATTTATGAATATAGATATATTTTCAGGCATAAAAAATGATGTTGAGTATTTGAAAACAATGAAAAAATATAAAGATTATAAAGACTTAAAATTAGCTGATTTAGGGTATTTTAAAATTGATTATTTAAAAAGGCTTGATAAAAGTGGGACATCTTTTATATCGAAAGTAAAAAGCAATACCATTATATATAAAAAATCCAAATCCTGAAAAATATAAGTTGGAACATAAAAAAGTCTAGTGAGTATATAAAAATAGATATCATTAAGTTAGCAGAGCCTTTAGTAGCAGGCGAAACAATTGAACTTAATGATATCTATATTGGCTCTAAAAAAGAGCTTAAAAGCAGATTAATTATAACAAAATTAACTGAAGAAAACAAATGTAAAAGAATATTTAAGCGTATTGAAGGTATAAAAAANNNNNTTAAT

SEQ ID NO: 22704 - protein, 216 aa, Streptococcus agalactiae
  VARIANT 6, 11, 70, 213, 214, 215: Xaa = Any Amino Acid
MKEIFXKFLYXQNNTLTNLERTLRTYFDRVIINDSTSFTLPKEFKKKFPGSGGVASPSSIKVQLQYELLXGSFMNIDIFSGIKNDVEYLKTMKKYKDYKDLKLADLGYFKIDYLKRLDKSGTSFISKVKSNTSLYIKNPNPEKYKVGTIKKSSEYIKIDIIKLAEPLVAGETIELNDIYIGSKKELKSRLIITKLTEENKCKRIFKRIEGIKXXXN

SEQ ID NO: 22705 - protein, 690 aa, Streptococcus agalactiae
ATGTCTTCCGCCCGTATGGGATTACGGGCACAGGGTGAACCTCTTTCCACTCTGATCATTGAGGATAAGCTTCCCGAAGGACTTGAAGTGGTTCCCGGCTCTATTACCGAAGGCGGAGTTGAGAATAGCGGTATGATTAAATGGACGTTGGAAAATGTTCCCAGAGGAGTGAATAAAGTCGTAACATTTAAAGCGAAGCTGAAAACCCCGTTGATTCAGGCGTATTATCAGAACATCATGAAAAATACCGCCAAAGTAACCACTCAATGGACAGTAGATATACCGGAACCTGCAAGCGGTCAGTTAAGTCTGAGGCGTGAAGAGTCGCAAGAATATACTTCACAAACCGATACTACGTATCATCAGCGCGCCGTTTGTACGGTTAAATTCACCGTCGACCCTGCAGCCGGAGGCGCATTGACCAACGGAAACGATCAAGTGATTGATTATGGTACGAAACCGGCCGCAGGCGTGACGGTAACCCCATCGGGTGCTTCGTATAAGTTTAAAGGCTGGAAACATGGCGGGTTTACTTCGCTGAAAGACGGTGAAGCGGCTGCTCCCGCAGCATCGGGGCCGGAGGGGGATGCCAACTGGTATACTACGGTAGATGTGAAAGGCGATGTGACCTTTACGGCCGAGATGGTGTTGCAAGGCTATGCAATTACCTACGATTATAATGATNNNNNT

SEQ ID NO: 22706 - protein, 230 aa, Streptococcus agalactiae
  VARIANT 229, 230: Xaa = Any Amino Acid
MSSARMGLRAQGEPLSTLIIEDKLPEGLEVVPGSITEGGVENSGMIKWTLENVPRGVNKVVTFKAKLKTPLIQAYYQNIMKNTAKVTTQWTVDIPEPASGQLSLRREESQEYTSQTDTTYHQRAVCTVKFTVDPAAGGALTNGNDQVIDYGTKPAAGVTVTPSGASYKFKGWKHGGFTSLKDGEAAAPAASGPEGDANWYTTVDVKGDVTFTAEMVLQGYAITYDYNDXX

SEQ ID NO: 22707 - protein, 186 aa, Streptococcus agalactiae
GTGGGAATAAAAAAAGAAAAACATCCACATGAATCCTATTTGGTCAATAACGTCGAATCAGGCGATAGCCCGAGAAGTGCGAGACTATCTGATGATTGCTTTGGGAATGGTGCTTTACAGTATCGGATGGACGGTGTTTCTCCTCCAAATGATATTATGACAGGCGGTGTGCCCGGNNNNNTTAAT

SEQ ID NO: 22708 - protein, 62 aa, Streptococcus agalactiae
  VARIANT 60, 61: Xaa = Any Amino Acid
MGIKKEKHPHESYLVNNVESGDSPRSARLSDDCFGNGALQYRMDGVSPPNDIMTGGVPGXXN

SEQ ID NO: 22709 - protein, 522 aa, Streptococcus agalactiae
ATGGATTTTATTTATAAAGAAAAAGTTTCAGGAGCAACAATTAATAGAGAGAAACTAAATGAACTTATCAATAATTTAAAAGCAGGAGATACAATTTATGTAACTGATTTGACTAGAATAACAAGAAGTACTAAAGATTTATTTTTGCTGATAGAAAAAATTAAAAGTAAAGATGCAAATTTAAAATCACTTAAAGATACCTGGATTGATTTATCTGAAAGTAATCCATATAGTGATTTTTTAATAACTGTAATGGCTGGAGTTAATCAACTTGAAAGAGATCTTATAAAAATGAGACAAAAAGAAGGAATAGAAATTGCAAAATCTCAAGGTAAATATAAAGGCCGATTAAAAAAATATAATAAAAATCATGAAGGAATGAATTATGCAATTAAGTTATATCATGAAGGTAATATGACAGTTAAGCAAATTTGTAAAATAACCAATATATCTAAATCATCACTTTATAGAAGGCTTTCAGAAGAAAAAACGGGGCAAGTTACAAATACTTACAAAAGTCTG

SEQ ID NO: 22710 - protein, 174 aa, Streptococcus agalactiae
MDFIYKEKVSGATINREKLNELINNLKAGDTIYVTDLTRITRSTKDLFLLIEKIKSKDANLKSLKDTWIDLSESNPYSDFLITVMAGVNQLERDLIKMRQKEGIEIAKSQGKYKGRLKKYNKNHEGMNYAIKLYHEGNMTVKQICKITNISKSSLYRRLSEEKTGQVTNTYKSL

SEQ ID NO: 22711 - protein, 141 aa, Streptococcus agalactiae
ATGATTTCGCCATTGAAAGTTTTAGCTAATTCAATTCCTAATGCTGTCTTCCCAACCGCAGTTGGACCAACAACTGCTATAAGCTTGATTTTTCTCATGAATACTTCTCAATTCTATAAAGGTTTTTACTTGAAATTTAAC

SEQ ID NO: 22712 - protein, 47 aa, Streptococcus agalactiae
MISPLKVLANSIPNAVFPTAVGPTTAISLIFLMNTSQFYKGFYLKFN

SEQ ID NO: 22713 - protein, 507 aa, Streptococcus agalactiae
ATGAGAAAAATCAAGCTTATAGCAGTTGTTGGTCCAACTGCGGTTGGGAAGACAGCATTAGGAATTGAATTAGCTAAAACTTTCAATGGCGAAATCATTAGTGGTGATAGTCAGCAAGTTTATCAGAAGTTAGATATCGGAACGGCTAAAGCTAGTAAAGAAGAGCAAGAACAAGCTTATCATCACTTGATTGATGTTCGTGAAGTAAATGAGAACTATTCGGTTTATGATTTTGTCAAAGAGGCAAAAGTAGCTATTGATACGATTATTTCTAAGGGGAAAATCCCTATTATTGTTGGAGGTACTGGCCTATATTTACAGAGTTTGTTTGAGGGCTATCATTTAGGAGGCGAAGTCAATCAAGAAACTCTTATGGCCTATCGTGAAAAATTAGAGTCTCTAAGTGATGAAGATTTATTTGAAAAGTTGACAGAACAATCCATTGTTATACCGCAAGTTAATCGTCGACGTGCCATTCGTGCATTAGAATTGGCGAAGTTTGGGAAA

SEQ ID NO: 22714 - protein, 169 aa, Streptococcus agalactiae
MRKIKLIAVVGPTAVGKTALGIELAKTFNGEIISGDSQQVYQKLDIGTAKASKEEQEQAYHHLIDVREVNENYSVYDFVKEAKVAIDTIISKGKIPIIVGGTGLYLQSLFEGYHLGGEVNQETLMAYREKLESLSDEDLFEKLTEQSIVIPQVNRRRAIRALELAKFGK

SEQ ID NO: 22715 - protein, 634 aa, Streptococcus agalactiae
GTGCAATACCATGCCGCCTACCGGCTGGATGCCGTGAAGAGAGCGCTTCAAACGGCCGATGCGGAAAAGACCGAGGCACTCTACCGAAGCCTCACATGCTTCGAAGTATCGGCTCACTACGATCTTGGAGGAGGCGCACGCGAAAATGTACATCCGCTGTTTGCCGTACTGAACAACCTCGTGACCCGCGGACGGCCCACACAAGCCAGTCCGCTTCTCGAAGAAGCTTTTGCCCCATTAGGTAACCGACGCATCGACCTCGACGGAGACCTTCGTTACGATACACGGGGATTGCATGCCGAAGACGTATTTGACGCTTTGCACATCATCGATCCCCGCCTGAATCTGGACGAATCAAATTACAATAACAAGTTGCTCGAAAGCGATGCCGAAAAGACATTCATCACCCGGATAGTGCCCCAGCCGTTACGTCAGCTGCTGCAACCGCAGCGCAATCTCTATTCACTCACTAAACAAAAGGCATCCCATACGCAACGAATCGATTTTGCATGTGAGTTCCCCTACCCGACCAAAGACGAAAAGACTTTTGGCATGACGGATGCGCCATCGAAATCCATGAGACACTCTTTCACTCCGGCATGGAGCAAACGCGCCGACAANNNNNTTAATTAAT

SEQ ID NO: 22716 - protein, 212 aa, Streptococcus agalactiae
  VARIANT 181, 208, 209: Xaa = Any Amino Acid
MQYHAAYRLDAVKRALQTADAEKTEALYRSLTCFEVSAHYDLGGGARENVHPLFAVLNNLVTRGRPTQASPLLEEAFAPLGNRRIDLDGDLRYDTRGLHAEDVFDALHIIDPRLNLDESNYNNKLLESDAEKTFITRIVPQPLRQLLQPQRNLYSLTKQKASHTQRIDFACEFPYPTKDEXDFWHDGCAIEIHETLFHSGMEQNAPTXXLIN

SEQ ID NO: 22717 - protein, 759 aa, Streptococcus agalactiae
GTGACGGCGCTCCACGCCGGCTTTGACCGTACGGAACGCGAACGACGCGAGCGACGGACAGAGTCGTCCGAAACGTTGATTATTGCGCTTTCCTACGACCAGCTCGGTCGATTTCCGCTCTTGCAACGTTTCAGGTATATGCAGCAGACGGGCGTATACTTCGCCACAGGCATCCTCGACGAGGTGCAGGGACTCTCGGAATGGAGTCCCGACTTCCTGCCGGCATCGATGCTCGCAGGTCAAACGCTCTACCGGCACACCTGCTCAACAAGGAAAATAGCCCTTTTGGGCTGACCGAACGGGCCTCGTTCGACATGCTCTTCGACATCGACAGGCGCTCTCGCCCGGCGATGCCTGCCCGACAGACCGAGACCGGCTCGTGTGTGCAAAAGCGCAGGAGTGCCCGAGTCGGCCTATCGGAAAGAACGCTACCTTCGTTATTTTTGTGGTCTCGAAGCCGAAAACGAATGCATCGAACACCTGATCGGTTATGCTCCTGTCTCCTGCCTCGAAGGAGATCGTACGATACCGGCCAAAGGATGCTATTTCCCGCTCACACTCGATAATCTGCCAGACGAACGTATCCTTTTCCTGCCATACCCCGCCACAGAGCGCGACGGACCCAAAGACGACCGTTCCAAGAAAGACCCGCTCATGCTCTACACCAAAGCATTCTATCGCATGAGCACCCTCGGACTGATGAAACAAATCACCTTTGATGAAGCGACAACAGCAATACCGCATCNNNNNTTAATTAAT

SEQ ID NO: 22718 - protein, 255 aa, Streptococcus agalactiae
  VARIANT 92, 97, 112, 251, 252: Xaa = Any Amino Acid
MTALHAGFDRTERERRERRTESSETLIIALSYDQLGRFPLLQRFRYMQQTGVYFATGILDEVQGLSEWSPDFLPASMLAGQTLYRHTLPQQXKIALXGLTERASFDMLFDIXQALSPGDACPTDRDRLVLCKSAGVPESAYRKERYLRYFCGLEAENECIEHLIGYAPVSCLEGDRTIPAKGCYFPLTLDNLPDERILFLPYPATERDGPKDDRSKKDPLMLYTKAFYRMSTLGLMKQITFDEATTAIPHXXLIN

SEQ ID NO: 22719 - protein, 708 aa, Streptococcus agalactiae
GTGCAATTAACTAAAATACATCAAACCAAAATTAATCAAATTTATAGTCTTAGCCAAAGATATGAACCATATGCCTTAGAGATTCAATGTTGATAAAACATGCTTTACTTTCTGTATTTTTGATAAATTTATCTAAAGATTTAACAGATAAAGCATTTGAAATTCACGATAGATTGATAATTAATCTAATGGCCAAAGGGCGAAAAGCTCAAGAAGAAATTCAAAAACAAAATGGTAAAAAAATAAATGAAAAAATAATTCAATTCACTAGTATTGGCAAAGCTTTAATAAAAGCTAAAGAAAATAACCTTGATCCATATAAAGTTATCGAGGAAATAATGGACTGGTCAACACTTGTAAAGTCAATTGATGAAGCCAAGGCACTTACTAGACCGGAAGATTATGATTATTTAGATTTATTACATAGACGTTATTCATTTTTAAGAAGATATACTCCAAAATTATTAAAAGTATTAGAGTTTAAATCTACAAAATCAAATGAACCAATACTAGAATCAATTGAAATAATAAAATCTTTGAATGAAAGTGGAAAACGTAAGGTTCCAGATAATTCTCCAGTAGATTTTATATCTAAACGTTGGAAAACCATATTTTAGAGAATGATGGATCTATAAATAGACATTATTATGAAATGGCTGTATTAACTAGTAAGAGATCGGTTAAGCGGGTGATATATCTATATGCGGT

SEQ ID NO: 22720 - protein, 239 aa, Streptococcus agalactiae
  VARIANT 26, 33, 34: Xaa = Any Amino Acid
MQLTKIHQTKINQIYSLSQRYEPYAXREFNVDXXHALLSVFLINLSKDLTDKAFEIHDRLIINLMAKGRKAQEEIQKQNGKKINEKIIQFTSIGKALIKAKENNLDPYKVIEEIMDWSTLVKSIDEAKALTRPEDYDYLDLLHRRYSFLRRYTPKLLKVLEFKSTKSNEPILESIEIIKSLNESGKRKVPDNSPVDFISKRWKNHILENDGSINRHYYEMAVLTELRDRVKAGDISICG

SEQ ID NO: 22721 - protein, 654 aa, Streptococcus agalactiae
ATGGAAACCTTAAGAGAAAAAATAAATAAACAGAGAGAATATTTTAGTACAGGTGAAACTAAGGATATAAATTTTAGAATAGAAAAACTAAAGAAGTTAAGAGATGTTTTAAAAAGTGAGGAAGAGAAAGTCTTTGAAGCCTTAAAAAAAGACTTAATGAAATCTAGCTTTGAATCCTATGTTACAGAAGTGGCAATGGTATATGATGAAATAAATATGCACATTAAAAATATAAAAAAATGGAGCAAAAAAAGAAGAGTAAAAACTCCATTAGTACAATTCCCAGCAAAAAGTTTTATACAGTTAGAACCTTATGGAGTTGTTTTAATAATAGGTCCTTTTAATTATCCTTTTATGCTTACAATGGATCCTTTAATTGGAGCAATAGCAGCTGGGAACACAGCGGTTATAAAGCCTTCTGAATCAGCACCAGAGACATCTAAAATTCTTAAAGAAATATTAGAAAAAGTATTTGATGAAAAGTATGTTCTTCATATTAATCCAGAAAGAGGAAAAGAAGTTGTAGAAGAACTTTTAAAAGAAAAATTTGATTATATTTTCCTTTACTGGAAGTGCTACTGTAGGAAAAATAGTAATGAAGGCAGCTTCTCAATATTTAACCCCTGTAACTTTAGAACTTNNNNNTTAATTAAT

SEQ ID NO: 22722 - protein, 218 aa, Streptococcus agalactiae
  VARIANT 214, 215: Xaa = Any Amino Acid
METLREKINKQREYFSTGETKDINFRIEKLKKLRDVLKSEEEKVFEALKKDLMKSSFESYVTEVAMVYDEINMHIKNIKKWSKKRRVKTPLVQFPAKSFIQLEPYGVVLIIGPFNYPFMLTMDPLIGAIAAGNTAVIKPSESAPETSKILKEILEKVFDEKYVLHINPERGKEVVEELLKEKFDYIFLYWKCYCRKNSNEGSFSIFNPCNFRTXXLIN

SEQ ID NO: 22723 - protein, 732 aa, Streptococcus agalactiae
GTGAAATTATATGATAAATATGGTGGATGGGAATCAAAGCATGTCGTAGAATTATTTGCGAAATTTGCTAAGACTGCCTTTAGTTTATTTGGTGATAGGGTTAAAAAATGGGCTACATTTAATGAACCTATAGTTATTATTGAAGGACAGTTTTTATATAAATGGCATTATCCTTGTATAGTTGATGGAAAAAGAGGGCTTCAAGCTGCCTATAATATAGCATTAGCTTCTGCTAGAGTCATAGAAGAGTATAGAAAATTAGGACAAGATGGAGAAATAGGAATAATAGTTAACTTAACGCCAGCATATCCAAGAAGTGAGTCAAAAGAAGATTTAAGAGCTGCTGAAATTGCCAATGCTTTCTTCAATGAGTTATTCTTAGATCCAGCAACTAAGGGAGAATTTCCTAAGAACTTAGTTGAGGTTTTAGAAAAAGATGGAGTAATGTGGAATTCTACTAAGGAAGAATTACAGGTTATAAAAAATAATACTGTGGATTTCTTAGGGGTAAACTACTATCAACCAAGAAGGGTTAAAGCTAGAGAAGAGGAATATGGTGGAGAAACATGGGCTCCAGAAAAATATTTTGATAATTATGACATGCCAGGAAAGAGAATGAATCCTCATAGAGGATGGGAAATATATCCTAAGGCAATTTATGATATAGCTAAAAATGTACAAGAGAACTATGGCAACAGAAGAATGGTTCATTTCAGAANNNNNTTAATTAAT

SEQ ID NO: 22724 - protein, 244 aa, Streptococcus agalactiae
  VARIANT 240, 241: Xaa = Any Amino Acid
MKLYDKYGGWESKHVVELFAKFAKTAFSLFGDRVKKWATFNEPIVIIEGQFLYKWHYPCIVDGKRGLQAAYNIALASARVIEEYRKLGQDGEIGIIVNLTPAYPRSESKEDLRAAEIANAFFNELFLDPATKGEFPKNLVEVLEKDGVMWNSTKEELQVIKNNTVDFLGVNYYQPRRVKAREEEYGGETWAPEKYFDNYDMPGKRMNPHRGWEIYPKAIYDIAKNVQENYGNRRMVHFRXXLIN

SEQ ID NO: 22725 - protein, 588 aa, Streptococcus agalactiae
GTGGTTGATAATGGAGATACTATACAAGGAAATTTCAATCACTTATTTAAAAATGGTCCTAATCCTATGGTTATGGGAATGAATGCTATAGGATATGATGTTTTCTCTTTAGGAAATCATGAATTTAACTATGGAATGGACAACCTTAATGATGTTGTAAGTCAAGCTAATGATAATTTAGATGTATTATGTGCAAATCTTTATAAAGATGGTAAGAGAGTTTATGAAGGATATACAACTAGGGAAATAGAAGGCGTTGAAGTTGCTTTAATTGGAGTTGTAAGTCCTCATATAATGAAATGGGATTCAGAAAATCTAAAAGGATATGAGGCTAAAAATCCTGCAGAAGAAGTTGGATTTGTAATAGATGAAATAGAAAATAGACCTGAGGGTGGCGCTGATGTTTATGCAGTAGTTTCACATGTGGGATTAGAAAGTGAATATGGTAATGGAGATAGTGCTAGAGCCATAGCTGAAATGAACCCAGAGGTATCTGCCATAGTTGCAGGACATAGTCATACTAATGTACCAGAAGAAAAAATAAACAATGCAGTTATAAGCCAACCTACAAGTANNNNNTTAATTAAT

SEQ ID NO: 22726 - protein, 196 aa, Streptococcus agalactiae
  VARIANT 192, 193: Xaa = Any Amino Acid
MVDNGDTIQGNFNHLFKNGPNPMVMGMNAIGYDVFSLGNHEFNYGMDNLNDVVSQANDNLDVLCANLYKDGKRVYEGYTTREIEGVEVALIGVVSPHIMKWDSENLKGYEAKNPAEEVGFVIDEIENRPEGGADVYAVVSHVGLESEYGNGDSARAIAEMNPEVSAIVAGHSHTNVPEEKINNAVISQPTSXXLIN

SEQ ID NO: 22727 - protein, 468 aa, Streptococcus agalactiae
ATGGTTTCATCAGCAGCTTTATTTAGTCCTAAGGCTAATCTTAAAGAAGGTCCTATAAGCAAGGCTGATGTTTCAAATATATATAAATTTGATAATAAATTATATGTTATAAAAACTAATGGAAAACAATTAAAGAAATACATGGAAGAAAACTCTAAGTTCTTTAATAAATATAAAGATGGAGATTTAACTATATCTTTTGATGAAAATGTAAGAATGTATAAGTATGATATGTTTGAAGGGGTTAATTATGAAATAAATATAGCTAAAGATCCAGGTGAAAGAATAGAAAACTTAAAATTCTCTAAAGATGGTAAACCAGTTGAGGATTCAGATGTAGTGTATTTATCAGTAAATGATTATAGATATAATTCAGGGTTAGCTGCAGGAATAATGGATCCAGGTGAACATGAAAAAATATATGATACAGTAAATGATGATATATCAGCAATAAGAGATTTAATAAAG

SEQ ID NO: 22728 - protein, 156 aa, Streptococcus agalactiae
MVSSAALFSPKANLKEGPISKADVSNIYKFDNKLYVIKTNGKQLKKYMEENSKFFNKYKDGDLTISFDENVRMYKYDMFEGVNYEINIAKDPGERIENLKFSKDGKPVEDSDVVYLSVNDYRYNSGLAAGIMDPGEHEKIYDTVNDDISAIRDLIK

SEQ ID NO: 22729 - protein, 183 aa, Streptococcus agalactiae
TTGAATCAAAGGAGATTAGATTTTAATAGCATAAATGCCTATATTACCAATATATCTAGTGATATTATTACTATGAATGAAGTACATGAGCTATATTCATTAAGATGGCAAATAGAAATAATATTCAAAGTTTGGAAATCTATATTTAAAATTAATCAAGTAAAAAAAGNNNNNTTAATTAAT

SEQ ID NO: 22730 - protein, 61 aa, Streptococcus agalactiae
  VARIANT 57, 58: Xaa = Any Amino Acid
MNQRRLDFNSINAYITNISSDIITMNEVHELYSLRWQIEIIFKVWKSIFKINQVKKXXLIN

SEQ ID NO: 22731 - protein, 93 aa, Streptococcus agalactiae
ATGCTAGAAGATTGGGAAATCCATAGGCAAAGAGCCTTCAAAGACCAAATAGAATTAAAAGATATTAGAGAGGTTCTTAAAGTTATCTACAAG

SEQ ID NO: 22732 - protein, 31 aa, Streptococcus agalactiae
MLEDWEIHRQRAFKDQIELKDIREVLKVIYK

SEQ ID NO: 22733 - protein, 608 aa, Streptococcus agalactiae
ATGATAGTGAAATATTTGAGAGTTAGTACAATAGAGCAAGAGCAAACAAGACAAGAGTACCTATTAGAAAAGTTAAATATAAAGTTTAATAAATCCTATGAGGATAAAATGACAGGTAAGACAAAAGAAAGACCACAATTAAAGAAAATGATTGAAGAGGTAAAAGAGGGCGACACAGTATATTGTGAAAGTATATCAAGACTAGGAAGAAATCTAAAAGACTTAATAGATATAATTGATACACTAATAAATAAAGGTGTGAGAGTTGTAATACTGAAAGAAGGAATAGATACAAGTAATTCAACCTATAAACTTCTATTGGGGATTTTTGGAAGTATTGCAGAAATGGAAAGAGAAACTATACAAGAAAGAACCAAACAGAGCATTGACGCTTTAAAAGAAATAAAGGAGCATACTGGAGAAATAAAAACAAAGAGTGGTAAATGGTTTGGAAGAGAAGAAAAGACAATTAACGATTTACCTAATAATTTTGAAAAGTATTATAACAAAATGATAAATGGAGAAATAACAAAAGTTGAAATGGCTAAACTTTTAGGAGTGGGAGAGCTACTGTCTACAGATGGATTAAACTATATGAAAATAATAAA

SEQ ID NO: 22734 - protein, 203 aa, Streptococcus agalactiae
MIVKYLRVSTIEQEQTRQEYLLEKLNIKFNKSYEDKMTGKTKERPQLKKMIEEVKEGDTVYCESISRLGRNLKDLIDIIDTLINKGVRVVILKEGIDTSNSTYKLLLGIFGSIAEMERETIQERTKQSIDALKEIKEHTGEIKTKSGKWFGREEKTINDLPNNFEKYYNKMINGEITKVEMAKLLGVGRATVYRWIKLYENNK

SEQ ID NO: 22735 - protein, 477 aa, Streptococcus agalactiae
GTGACACCAAAACCAGTACCGGATAAAGATAAATATGATCCAACAGGAGGGGAAACAACAGTACCCCAAGGGACACCAGTTTCAGATAAAGAAATCACAGACTTAGTTAAGATTCCAGATGGCTCAAAAGGGGTTCCGACAGTTGTTGGTGATCGTCCAGATACTAACGTTCCTGGAGATCATAAAGTAACGGTAGAAGTAACGTATCCAGATGGAACAAAGGATACAGTAGAAGTAACGGTTCATGTGACACCAAAACCAGTACCGGATAAAGATAAATATGATCCAACAGGAGGGGAAACAACAGTACCCCAAGGGACACCAGTTTCAGATAAAGAAATCACAGACTTAGTTAAGATTCCAGATGGCTCAAAAGGGGTTCCGACAGTTGTTGGTGATCGTCCAGATACTAACGTTCCTGGAGATCATATAGTAACGGTAGAAGTAACGTATCCAGATGGAACAAAGGATNNNNNT

SEQ ID NO: 22736 - protein, 159 aa, Streptococcus agalactiae
  VARIANT 158, 159: Xaa = Any Amino Acid
MTPKPVPDKDKYDPTGGETTVPQGTPVSDKEITDLVKIPDGSKGVPTVVGDRPDTNVPGDHKVTVEVTYPDGTKDTVEVTVHVTPKPVPDKDKYDPTGGETTVPQGTPVSDKEITDLVKIPDGSKGVPTVVGDRPDTNVPGDHIVTVEVTYPDGTKDXX

SEQ ID NO: 22737 - protein, 270 aa, Streptococcus agalactiae
TTGTTTTGGACATCACTATACAATAAATTTGGTTTACATGTATTAGATTCATATGAATTAAAAAGTGTTTATGAAGCCGAGTTTAATAAAATTTTTATTGGAGGAATTAAAATGAAATTAGCTGAGGCATTGATTTTAAGAGCAGATTTACAAAAAGAATTAATGAGTTTAAAAAATAGAATAAATCAAAACTTACTAGTTCAAGAAGGTGAGAAACCCTCTGAGAACCCATATACACTATATGATGAGATACTGTTAAAAGTANNNNNT

SEQ ID NO: 22738 - protein, 90 aa, Streptococcus agalactiae
  VARIANT 89, 90: Xaa = Any Amino Acid
MFWTSLYNKFGLHVLDSYELKSVYEAEFNKIFIGGIKMKLAEALILRADLQKELMSLKNRINQNLLVQEGEKPSENPYTLYDEILLKVXX

SEQ ID NO: 22739 - protein, 528 aa, Streptococcus agalactiae
ATGACTGTTGAATTTAATAAAATCAACGATACAGTTAACAGCCATAGTCAATTGATTGGTAAACAGAACGAGAGTCTGACGGCTACAATACAAAAAGTTGATAATATACAATCAACAGTATCTAATGTTGATGGACGTTTGTCACGAGTTACACAAACTGCCGACGGTATAGTCACAACAGTTAGTCAGCTTGATAATAATATTTTACCTGGCACAAAAAATTTTACAGGATGGCAAATAGAAGGTGCAGTACTAGAAGATGTAACACAATCATCTTATCCATTTGTCTTTAAAAAATGGATAAGCGGCAACAAGGTATCGCCCTTAATCGAATATGATGTTAAAAAAAATCAAGAGTACACATTTACTGCATACATTGCTAGAGAACAAGCAGGTAATCTATATTTCTACTTGTACGATCTTTGGAATCATCATATCACAAGTGCAACCCCTCGCGAAACCATTATAAGAGACGTTAATTCTAGTGTAATACGATTTAGAAATACATTTATTCCCAATAGAGACGGG

SEQ ID NO: 22740 - protein, 176 aa, Streptococcus agalactiae
MTVEFNKINDTVNSHSQLIGKQNESLTATIQKVDNIQSTVSNVDGRLSRVTQTADGIVTTVSQLDNNILPGTKNFTGWQIEGAVLEDVTQSSYPFVFKKWISGNKVSPLIEYDVKKNQEYTFTAYIAREQAGNLYFYLYDLWNHHITSATPRETIIRDVNSSVIRFRNTFIPNRDG
